(19) United States
(12) Patent Application Publication
(10) Pub. No.: US 2026/0035694 A1
(43) Pub. Date: Feb. 5, 2026

(54) ANTISENSE OLIGOMERS FOR TREATMENT OF NON-SENSE MEDIATED RNA DECAY BASED CONDITIONS AND DISEASES

(71) Applicant: Stoke Therapeutics, Inc., Bedford, MA (US)

(72) Inventors: Isabel Aznarez, Boston, MA (US); Jacob Kach, Jamaica Plain, MA (US); Mikaela Downs, Lowell, MA (US); Sebastien Matthieu Hugues Weyn-Vanhentenryck, Cambridge, MA (US); Ana Corrionero Saiz, Cambridge, MA (US)

(21) Appl. No.: 18/869,417

(22) PCT Filed: Jun. 1, 2023
(86) PCT No.: PCT/US2023/024182

§ 371 Date: Nov. 26, 2024

Related U.S. Application Data
(60) Provisional application No. 63/347,743, filed on Jun. 1, 2022.

(51) Int. Cl. C12N 15/113

(52) U.S. Cl. CPC C12N 15/113; C12N 2310/11; C12N 2320/33

(57) ABSTRACT

Alternative splicing events in genes can lead to non-productive mRNA transcripts which in turn can affect protein expression level, and therapeutic agents which can target the alternative splicing events in genes can modulate the expression level of functional proteins in patients and/or inhibit aberrant protein expression. Such therapeutic agents can be used to treat a condition or disease caused by protein deficiency.

### CROSS-REFERENCE

[0001] This application is a national phase entry of International Application No. PCT/US2023/024182, filed Jun. 1, 2023, which claims the benefit of U.S. Provisional Application No. 63/347,743, filed Jun. 1, 2022, each of which is incorporated herein by reference in its entirety.

### SEQUENCE LISTING

[0002] The instant application contains a Sequence Listing which has been submitted electronically in XML format and is hereby incorporated by reference in its entirety. Said XML copy, created on Jul. 13, 2023, is named 47991-733_831_SL.xml and is 1,482,762 bytes in size.

### BACKGROUND

[0003] Alternative splicing events in genes can lead to non-productive mRNA transcripts which in turn can affect protein expression levels, and therapeutic agents which can target the alternative splicing events in genes can modulate the expression level of functional proteins in patients. Such therapeutic agents can be used to treat a condition or disease caused by protein deficiency.

### SUMMARY

[0004] Described herein, in certain embodiments, is a method of modulating expression of a target protein in a cell having a pre-mRNA that is transcribed from a target gene and that comprises a non-sense mediated RNA decay-inducing exon (NMD exon), the method comprising contacting an agent or a vector encoding the agent to the cell, whereby the agent modulates splicing of the NMD exon from the pre-mRNA, thereby modulating the level of a processed mRNA that is processed from the pre-mRNA, and modulating the expression of the target protein in the cell, wherein the target gene is a SETD5 gene. Described herein, in certain embodiments, is a method of treating or reducing the likelihood of developing a disease or condition in a subject in need thereof by modulating expression of a target protein in a cell of the subject, comprising: contacting an agent or a vector encoding the agent to the cell of the subject, whereby the agent modulates splicing of a non-sense mediated RNA decay-inducing exon (NMD exon) from a pre-mRNA that is transcribed from a target gene and that comprises the NMD exon, thereby modulating the level of a processed mRNA that is processed from the pre-mRNA, and modulating the expression of the target protein in the cell of the subject, wherein the target gene is a SETD5 gene.

[0005] Described herein, in certain embodiments, is a method of modulating expression of a target protein in a cell having a pre-mRNA that is transcribed from a target gene and that comprises a first exon that comprises a translational start site, the method comprising contacting an agent or a vector encoding the agent to the cell, whereby the agent modulates splicing of the first exon that comprises a translational start site from the pre-mRNA, thereby modulating the level of a processed mRNA that is processed from the pre-mRNA, and modulating the expression of the target protein in the cell, wherein the target gene is a SETD5 gene.

[0006] Described herein, in certain embodiments, is a method of treating or reducing the likelihood of developing a disease or condition in a subject in need thereof by modulating expression of a target protein in a cell of the subject, comprising: contacting an agent or a vector encoding the agent to the cell, whereby the agent modulates splicing of a first exon that comprises a translational start site from a pre-mRNA that is transcribed from a target gene and that comprises the first exon that comprises a translational start site, thereby modulating the level of a processed mRNA that is processed from the pre-mRNA, and modulating the expression of the target protein in the cell, wherein the target gene is a SETD5 gene.

[0007] In some embodiments, the first exon that comprises a translational start site is upstream of an NMD exon. In some embodiments, the NMD exon is upstream of the second exon that comprises a second translational start site.

[0008] In some embodiments, the target protein is SETD5.

[0009] In some embodiments, the agent: (a) binds to a targeted portion of the pre-mRNA; (b) modulates binding of a factor involved in splicing of the NMD exon; or (c) a combination of (a) and (b).

[0010] In some embodiments, the agent interferes with binding of the factor involved in splicing of the NMD exon or the first exon that comprises a translational start site to a region of the targeted portion.

[0011] In some embodiments, the targeted portion of the pre-mRNA is proximal to the NMD exon or the first exon that comprises a translational start site.

[0012] In some embodiments, the targeted portion of the pre-mRNA is at most about 1500 nucleotides, about 1000 nucleotides, about 800 nucleotides, about 700 nucleotides, about 600 nucleotides, about 500 nucleotides, about 400 nucleotides, about 300 nucleotides, about 200 nucleotides, about 100 nucleotides, about 80 nucleotides, about 70 nucleotides, about 60 nucleotides, about 50 nucleotides upstream of 5′ end of the NMD exon or the first exon that comprises a translational start site.

[0013] In some embodiments, the targeted portion of the pre-mRNA is at least about 1500 nucleotides, about 1000 nucleotides, about 800 nucleotides, about 700 nucleotides, about 600 nucleotides, about 500 nucleotides, about 400 nucleotides, about 300 nucleotides, about 200 nucleotides, about 100 nucleotides, about 80 nucleotides, about 70 nucleotides, about 60 nucleotides, about 50 nucleotides, about 40 nucleotides, about 30 nucleotides, about 20 nucleotides, about 10 nucleotides, about 5 nucleotides, about 4 nucleotides, about 2 nucleotides, about 1 nucleotides upstream of 5′ end of the NMD exon or the first exon that comprises a translational start site.

[0014] In some embodiments, the targeted portion of the pre-mRNA is at most about 1500 nucleotides, about 1000 nucleotides, about 800 nucleotides, about 700 nucleotides, about 600 nucleotides, about 500 nucleotides, about 400 nucleotides, about 300 nucleotides, about 200 nucleotides, about 100 nucleotides, about 80 nucleotides, about 70 nucleotides, about 60 nucleotides, about 50 nucleotides downstream of 3′ end of the NMD exon or the first exon that comprises a translational start site.

[0015] In some embodiments, the targeted portion of the pre-mRNA is at least about 1500 nucleotides, about 1000 nucleotides, about 800 nucleotides, about 700 nucleotides, about 600 nucleotides, about 500 nucleotides, about 400 nucleotides, about 300 nucleotides, about 200 nucleotides, about 100 nucleotides, about 80 nucleotides, about 70 nucleotides, about 60 nucleotides, about 50 nucleotides, about 40 nucleotides, about 30 nucleotides, about 20 nucleotides, about 10 nucleotides, about 5 nucleotides, about 4 nucleotides, about 2 nucleotides, about 1 nucleotides downstream of 3′ end of the NMD exon or the first exon that comprises a translational start site.

[0016] In some embodiments, the targeted portion of the pre-mRNA is at most about 1500 nucleotides, about 1000 nucleotides, about 800 nucleotides, about 700 nucleotides, about 600 nucleotides, about 500 nucleotides, about 400 nucleotides, about 300 nucleotides, about 200 nucleotides, about 100 nucleotides, about 80 nucleotides, about 70 nucleotides, about 60 nucleotides, about 50 nucleotides upstream of genomic site selected from the group consisting of: GRCh38/hg38: chr3 9429827; GRCh38/hg38: chr3 9433370; GRCh38/hg38: chr3 9434591 and GRCh38/hg38: chr3 9428823 9429009.

[0017] In some embodiments, the targeted portion of the pre-mRNA is about 1500 nucleotides, about 1000 nucleotides, about 800 nucleotides, about 700 nucleotides, about 600 nucleotides, about 500 nucleotides, about 400 nucleotides, about 300 nucleotides, about 200 nucleotides, about 100 nucleotides, about 80 nucleotides, about 70 nucleotides, about 60 nucleotides, about 50 nucleotides upstream of genomic site selected from the group consisting of: GRCh38/hg38: chr3 9429827; GRCh38/hg38: chr3 9433370; GRCh38/hg38: chr3 9434591 and GRCh38/hg38: chr3 9428823 9429009.

[0018] In some embodiments, the targeted portion of the pre-mRNA is at most about 1500 nucleotides, about 1000 nucleotides, about 800 nucleotides, about 700 nucleotides, about 600 nucleotides, about 500 nucleotides, about 400 nucleotides, about 300 nucleotides, about 200 nucleotides, about 100 nucleotides, about 80 nucleotides, about 70 nucleotides, about 60 nucleotides, about 50 nucleotides downstream of genomic site selected from the group consisting of: GRCh38/hg38: chr3 9430051; GRCh38/hg38: chr3 9433562; GRCh38/hg38: chr3 9434630 and GRCh38/hg38: chr3 9428823 9429009.

[0019] In some embodiments, the targeted portion of the pre-mRNA is about 1500 nucleotides, about 1000 nucleotides, about 800 nucleotides, about 700 nucleotides, about 600 nucleotides, about 500 nucleotides, about 400 nucleotides, about 300 nucleotides, about 200 nucleotides, about 100 nucleotides, about 80 nucleotides, about 70 nucleotides, about 60 nucleotides, about 50 nucleotides downstream of genomic site selected from the group consisting of: GRCh38/hg38: chr3 9430051; GRCh38/hg38: chr3 9433562; GRCh38/hg38: chr3 9434630 and GRCh38/hg38: chr3 9428823 9429009.

[0020] In some embodiments, the targeted portion of the pre-mRNA is located in an intronic region between two canonical exonic regions of the pre-mRNA, and wherein the intronic region contains the NMD exon.

[0021] In some embodiments, the targeted portion of the pre-mRNA at least partially overlaps with the NMD exon or the first exon that comprises a translational start site.

[0022] In some embodiments, the targeted portion of the pre-mRNA at least partially overlaps with an intron upstream or downstream of the NMD exon or the first exon that comprises a translational start site.

[0023] In some embodiments, the targeted portion of the pre-mRNA comprises a 5′ NMD exon exon-intron junction, a 3′NMD exon exon-intron junction, a 5′ first exon-intron junction, or a 3′ first exon-intron junction.

[0024] In some embodiments, the targeted portion of the pre-mRNA is within the NMD exon or the first exon that comprises a translational start site.

[0025] In some embodiments, the targeted portion of the pre-mRNA comprises about 5, 6, 7, 8, 9, 10, 11, 12, 13, 14, 15, 16, 17, 18, 19, 20, 21, 22, 23, 24, 25, 26, 27, 28, 29, 30, or more consecutive nucleotides of the NMD exon or the first exon that comprises a translational start site.

[0026] In some embodiments, the NMD exon or the first exon that comprises a translational start site comprises a sequence with at least 80%, at least 90%, or 100% sequence identity to the sequence set forth in any one of SEQ ID NO: 332-339.

[0027] In some embodiments, the NMD exon or the first exon that comprises a translational start site comprises the sequence set forth in any one of SEQ ID NO: 332-339.

[0028] In some embodiments, the pre-mRNA comprises a sequence with at least about 80%, 85%, 90%, 95%, 97%, or 100% sequence identity to the sequence set forth in any one of SEQ ID NO: 332-403.

[0029] In some embodiments, the pre-mRNA is encoded by a genetic sequence with at least about 80%, 85%, 90%, 95%, 97%, or 100% sequence identity to the sequence set forth in any one of SEQ ID NO: 332-403.

[0030] In some embodiments, the targeted portion of the pre-mRNA comprises a sequence with at least 80%, 85%, 90%, 95%, 97%, or 100% sequence identity to a region comprising at least 8 contiguous nucleic acids of the sequence set forth in any one of SEQ ID NO: 332-403.

[0031] In some embodiments, the agent is an antisense oligomer (ASO) and wherein the ASO comprises a sequence that is at least about 80%, 85%, 90%, 95%, 97%, or 100% sequence identity to at least 8, 9, 10, 11, 12, 13, 14, 15, 16, 17 or 18 contiguous nucleic acids of the sequence set forth in any one of SEQ ID NO: 1-331.

[0032] In some embodiments, the method comprises contacting the vector encoding the agent to the cell, wherein the agent is a polynucleotide comprising an antisense oligomer.

[0033] In some embodiments, the vector is a viral vector.

[0034] In some embodiments, the viral vector is an adeno-associated viral vector.

[0035] In some embodiments, the polynucleotide further comprises a modified snRNA.

[0036] In some embodiments, the modified human snRNA is a modified U1 snRNA or a modified U7 snRNA.

[0037] In some embodiments, the modified human snRNA is a modified U7 snRNA and wherein the antisense oligomer has a sequence at least 75%, at least 80%, at least 85%, at least 90%, at least 95%, at least 98%, at least 99%, or 100% identical to the sequence set forth in any one of SEQ ID NO: 1-331.

[0038] In some embodiments, the targeted portion of the pre-mRNA is within the NMD exon or the first exon that comprises a translational start site selected from the group consisting of: GRCh38/hg38: chr3 9429827 9430051; GRCh38/hg38: chr3 9433370 9433562; GRCh38/hg38: chr3 9434591 9434630 and GRCh38/hg38: chr3 9428823 9429009.

[0039] In some embodiments, the targeted portion of the pre-mRNA is upstream or downstream of the NMD exon or the first exon that comprises a translational start site selected from the group consisting of: GRCh38/hg38: chr3 9429827 9430051; GRCh38/hg38: chr3 9433370 9433562; GRCh38/hg38: chr3 9434591 9434630 and GRCh38/hg38: chr3 9428823 9429009.

[0040] In some embodiments, the targeted portion of the pre-mRNA comprises an exon-intron junction of the NMD exon or the first exon that comprises a translational start site selected from the group consisting of: GRCh38/hg38: chr3 9429827 9430051; GRCh38/hg38: chr3 9433370 9433562; GRCh38/hg38: chr3 9434591 9434630 and GRCh38/hg38: chr3 9428823 9429009.

[0041] In some embodiments, the target protein expressed from the processed mRNA is a full-length protein or a wild-type protein.

[0042] In some embodiments, the target protein expressed from the processed mRNA is at least partially functional as compared to a wild-type SETD5 protein.

[0043] In some embodiments, the target protein expressed from the processed mRNA is at least partially functional as compared to a full-length wild-type SETD5 protein.

[0044] In some embodiments, the agent promotes exclusion of the NMD exon or the first exon that comprises a translational start site from the processed mRNA thereby modulating the level of a processed mRNA that is processed from the pre-mRNA and that lacks the NMD exon or the first exon that comprises a translational start site.

[0045] In some embodiments, the exclusion of the NMD exon or the first exon that comprises a translational start site from the processed mRNA in the cell contacted with the agent is increased by about 1.1 to about 10-fold, about 1.5 to about 10-fold, about 2 to about 10-fold, about 3 to about 10-fold, about 4 to about 10-fold, about 1.1 to about 5-fold, about 1.1 to about 6-fold, about 1.1 to about 7-fold, about 1.1 to about 8-fold, about 1.1 to about 9-fold, about 2 to about 5-fold, about 2 to about 6-fold, about 2 to about 7-fold, about 2 to about 8-fold, about 2 to about 9-fold, about 3 to about 6-fold, about 3 to about 7-fold, about 3 to about 8-fold, about 3 to about 9-fold, about 4 to about 7-fold, about 4 to about 8-fold, about 4 to about 9-fold, at least about 1.1-fold, at least about 1.5-fold, at least about 2-fold, at least about 2.5-fold, at least about 3-fold, at least about 3.5-fold, at least about 4-fold, at least about 5-fold, or at least about 10-fold, compared to exclusion of the NMD exon or the first exon that comprises a translational start site from the processed mRNA in a control cell.

[0046] In some embodiments, the method results in an increase in the level of the processed mRNA in the cell.

[0047] In some embodiments, the level of the processed mRNA in the cell contacted with the agent is increased by about 1.1 to about 10-fold, about 1.5 to about 10-fold, about 2 to about 10-fold, about 3 to about 10-fold, about 4 to about 10-fold, about 1.1 to about 5-fold, about 1.1 to about 6-fold, about 1.1 to about 7-fold, about 1.1 to about 8-fold, about 1.1 to about 9-fold, about 2 to about 5-fold, about 2 to about 6-fold, about 2 to about 7-fold, about 2 to about 8-fold, about 2 to about 9-fold, about 3 to about 6-fold, about 3 to about 7-fold, about 3 to about 8-fold, about 3 to about 9-fold, about 4 to about 7-fold, about 4 to about 8-fold, about 4 to about 9-fold, at least about 1.1-fold, at least about 1.5-fold, at least about 2-fold, at least about 2.5-fold, at least about 3-fold, at least about 3.5-fold, at least about 4-fold, at least about 5-fold, or at least about 10-fold, compared to a level of the processed mRNA in a control cell.

[0048] In some embodiments, the agent increases the expression of the target protein in the cell.

[0049] In some embodiments, a level of the target protein expressed from the processed mRNA in the cell contacted with the agent is increased by about 1.1 to about 10-fold, about 1.5 to about 10-fold, about 2 to about 10-fold, about 3 to about 10-fold, about 4 to about 10-fold, about 1.1 to about 5-fold, about 1.1 to about 6-fold, about 1.1 to about 7-fold, about 1.1 to about 8-fold, about 1.1 to about 9-fold, about 2 to about 5-fold, about 2 to about 6-fold, about 2 to about 7-fold, about 2 to about 8-fold, about 2 to about 9-fold, about 3 to about 6-fold, about 3 to about 7-fold, about 3 to about 8-fold, about 3 to about 9-fold, about 4 to about 7-fold, about 4 to about 8-fold, about 4 to about 9-fold, at least about 1.1-fold, at least about 1.5-fold, at least about 2-fold, at least about 2.5-fold, at least about 3-fold, at least about 3.5-fold, at least about 4-fold, at least about 5-fold, or at least about 10-fold, compared to a level of the target protein produced in a control cell.

[0050] In some embodiments, the disease or condition is associated with a loss-of-function mutation in the target gene or the target protein.

[0051] In some embodiments, the disease or condition is associated with haploinsufficiency of the target gene, and wherein the subject has a first allele of the target gene encoding a functional protein, and a second allele of the target gene from which the protein is not produced or produced at a reduced level, or a second allele of the target gene encoding a nonfunctional protein or a partially functional protein.

[0052] In some embodiments, the disease or condition is an intellectual disability or an autism spectrum disease.

[0053] In some embodiments, the disease or condition is selected from the group consisting of: autism; mental retardation; mental retardation, autosomal dominant 23 (mrd23, autosomal dominant non-syndromic intellectual disability 23; autosomal dominant mental retardation 23; intellectual disability-facial dysmorphism syndrome due to setd5 haploinsufficiency; mental retardation, autosomal dominant, type 23); Cornelia De Lange Syndrome (cdls, typus degenerativus amstelodamensis, de lange syndrome, brachmann-de lange syndrome, bdls, brachmann de lange syndrome); alacrima, achalasia, and mental retardation syndrome (aamr, intellectual disability); chromosome 3pter-p25 deletion syndrome (3p-syndrome; 3p deletion syndrome; distal monosomy 3p; chromosome 3p-syndrome; chromosome 3, monosomy 3p25; del syndrome; deletion 3p25; distal 3p deletion; monosomy 3pter; telomeric monosomy 3p; partial monosomy 3p; 3p partial monosomy syndrome; chromo-some 3, deletion 3p; chromosome 3, monosomy 3p; chromosome 3p deletion syndrome; deletion 3p; monosomy 3p; deletion syndrome, chromosome 3pter-p25NK-cell enteropathy); and mental retardation, autosomal dominant 21 (mrd21; autosomal dominant non-syndromic intellectual disability 21; autosomal dominant mental retardation 21; intellectual disability-feeding difficulties-developmental delay-microcephaly syndrome; mental retardation, autosomal dominant, type 21).

[0054] In some embodiments, the disease or condition is associated with an autosomal recessive mutation of a SETD5 gene, wherein the subject has a first allele encoding from which: (i) the target protein is not produced or produced at a reduced level compared to a wild-type allele; or (ii) the target protein produced is nonfunctional or partially functional compared to a wild-type allele, and a second allele from which: (iii) the target protein is produced at a reduced level compared to a wild-type allele and the target protein produced is at least partially functional compared to a wild-type allele; or (iv) the target protein produced is partially functional compared to a wild-type allele.

[0055] In some embodiments, the disease or condition is an intellectual disability or an autism spectrum disease.

[0056] In some embodiments, the disease or condition is selected from the group consisting of: autism; mental retardation; mental retardation, autosomal dominant 23 (mrd23, autosomal dominant non-syndromic intellectual disability 23; autosomal dominant mental retardation 23; intellectual disability-facial dysmorphism syndrome due to setd5 haploinsufficiency; mental retardation, autosomal dominant, type 23); Cornelia De Lange Syndrome (cdls, typus degenerativus amstelodamensis, de lange syndrome, brachmann-de lange syndrome, bdls, brachmann de lange syndrome); alacrima, achalasia, and mental retardation syndrome (aamr, intellectual disability); chromosome 3pter-p25 deletion syndrome (3p-syndrome; 3p deletion syndrome; distal monosomy 3p; chromosome 3p-syndrome; chromosome 3, monosomy 3p25; del syndrome; deletion 3p25; distal 3p deletion; monosomy 3pter; telomeric monosomy 3p; partial monosomy 3p; 3p partial monosomy syndrome; chromo-some 3, deletion 3p; chromosome 3, monosomy 3p; chromosome 3p deletion syndrome; deletion 3p; monosomy 3p; deletion syndrome, chromosome 3pter-p25NK-cell enteropathy); and mental retardation, autosomal dominant 21 (mrd21; autosomal dominant non-syndromic intellectual disability 21; autosomal dominant mental retardation 21; intellectual disability-feeding difficulties-developmental delay-microcephaly syndrome; mental retardation, autosomal dominant, type 21).

[0057] In some embodiments, the agent promotes exclusion of the NMD exon or the first exon that comprises a translational start site from the pre-mRNA, thereby modulating the level of a processed mRNA that is processed from the pre-mRNA and that lacks the NMD exon or the first exon that comprises a translational start site and increases the expression of the target protein in the cell.

[0058] In some embodiments, the agent is an antisense oligomer (ASO) and wherein the antisense oligomer comprises a backbone modification comprising a phosphorothioate linkage or a phosphorodiamidate linkage.

[0059] In some embodiments, the agent is an antisense oligomer (ASO) and wherein the antisense oligomer comprises a phosphorodiamidate morpholino, a locked nucleic acid, a peptide nucleic acid, a 2′-O-methyl, a 2′-Fluoro, a 2′-O-methoxyethyl moiety, or a 2′-NMA moiety.

[0060] In some embodiments, the agent is an antisense oligomer (ASO) and wherein the antisense oligomer comprises at least one modified sugar moiety.

[0061] In some embodiments, each sugar moiety is a modified sugar moiety.

[0062] In some embodiments, the agent is an antisense oligomer (ASO) and wherein the antisense oligomer consists of from 8 to 50 nucleobases, 8 to 40 nucleobases, 8 to 35 nucleobases, 8 to 30 nucleobases, 8 to 25 nucleobases, 8 to 20 nucleobases, 8 to 15 nucleobases, 9 to 50 nucleobases, 9 to 40 nucleobases, 9 to 35 nucleobases, 9 to 30 nucleobases, 9 to 25 nucleobases, 9 to 20 nucleobases, 9 to 15 nucleobases, 10 to 50 nucleobases, 10 to 40 nucleobases, 10 to 35 nucleobases, 10 to 30 nucleobases, 10 to 25 nucleobases, 10 to 20 nucleobases, 10 to 15 nucleobases, 11 to 50 nucleobases, 11 to 40 nucleobases, 11 to 35 nucleobases, 11 to 30 nucleobases, 11 to 25 nucleobases, 11 to 20 nucleobases, 11 to 15 nucleobases, 12 to 50 nucleobases, 12 to 40 nucleobases, 12 to 35 nucleobases, 12 to 30 nucleobases, 12 to 25 nucleobases, 12 to 20 nucleobases, or 12 to 15 nucleobases.

[0063] In some embodiments, the agent is an antisense oligomer (ASO) and wherein the antisense oligomer is at least 80%, at least 85%, at least 90%, at least 95%, at least 98%, at least 99%, or 100%, complementary to the targeted portion of the pre-mRNA.

[0064] In some embodiments, the method further comprises assessing processed mRNA level or expression level of the target protein.

[0065] In some embodiments, the subject is a human.

[0066] In some embodiments, the subject is a non-human animal.

[0067] In some embodiments, the subject is a fetus, an embryo, or a child.

[0068] In some embodiments, the cells are ex vivo.

[0069] In some embodiments, the agent is administered by intrathecal injection, intracerebroventricular injection, intraperitoneal injection, intramuscular injection, subcutaneous injection, intravitreal, or intravenous injection of the subject.

[0070] In some embodiments, the method further comprises administering a second therapeutic agent to the subject.

[0071] In some embodiments, the second therapeutic agent is a small molecule.

[0072] In some embodiments, the second therapeutic agent is an antisense oligomer.

[0073] In some embodiments, the second therapeutic agent corrects intron retention.

[0074] In some embodiments, the pre-mRNA comprises two or more NMD exons.

[0075] In some embodiments, the pre-mRNA comprises three or more NMD exons.

[0076] In some embodiments, splicing of one or more NMD exons from the pre-mRNA are modulated.

[0077] In some embodiments, splicing of two or more NMD exons from the pre-mRNA are modulated.

[0078] In some embodiments, splicing of three or more NMD exons from the pre-mRNA are modulated.

[0079] In some embodiments, the two or more NMD exons are located in a single intron.

[0080] In some embodiments, the two or more NMD exons are located in different introns.

[0081] In some embodiments, the three or more NMD exons are located in a single intron.

[0082] In some embodiments, the three or more NMD exons are located in different introns.

[0083] In some embodiments, the method treats the disease or condition.

[0084] In some embodiments, the NMD exon is an exon that encodes an amino acid sequence that comprises a cleavage site.

[0085] In some embodiments, the NMD exon is an exon that comprises a premature termination codon (PTC).

[0086] In some embodiments, the exon that comprises the PTC is an NMD exon.

[0087] In some embodiments, the NMD exon is downstream of a translation start site.

[0088] In some embodiments, the NMD exon does not comprise a translation start site.

[0089] In some embodiments, the NMD exon is an exon in a 5′UTR.

[0090] In some embodiments, the NMD exon is an exon in a 5′UTR that comprises a PTC.

[0091] Described herein, in certain embodiments, is a composition comprising an agent or a vector encoding the agent that modulates splicing of a non-sense mediated RNA decay-inducing exon (NMD exon) from a pre-mRNA that is transcribed from a target gene and that comprises the NMD exon, thereby modulating the level of a processed mRNA that is processed from the pre-mRNA, and modulating expression of a target protein in a cell having the pre-mRNA, wherein the target gene is a SETD5 gene. Described herein, in certain embodiments, is a composition comprising an agent or a vector encoding the agent that modulates splicing of a non-sense mediated RNA decay-inducing exon (NMD exon) from a pre-mRNA that is transcribed from a target gene and that comprises the NMD exon, thereby treating a disease or condition in a subject in need thereof by modulating the level of a processed mRNA that is processed from the pre-mRNA, and modulating expression of a target protein in a cell of the subject, wherein the target gene is a SETD5 gene.

[0092] Described herein, in certain embodiments, is a composition comprising an agent or a vector encoding the agent that modulates splicing of a first exon that comprises a translational start site from a pre-mRNA that is transcribed from a target gene and that comprises the first exon that comprises a translational start site, thereby modulating the level of a processed mRNA that is processed from the pre-mRNA, and modulating expression of a target protein in a cell having the pre-mRNA, wherein the target gene is a SETD5 gene.

[0093] Described herein, in certain embodiments, is a composition comprising an agent or a vector encoding the agent that modulates splicing of a first exon that comprises a translational start a pre-mRNA that is transcribed from a target gene and that comprises the first exon that comprises a translational start site, thereby treating a disease or condition in a subject in need thereof by modulating the level of a processed mRNA that is processed from the pre-mRNA, and modulating expression of a target protein in a cell of the subject, wherein the target gene is a SETD5 gene.

[0094] Described herein, in certain embodiments, is a pharmaceutical composition comprising the composition as described herein; and a pharmaceutically acceptable excipient and/or a delivery vehicle.

### INCORPORATION BY REFERENCE

[0095] All publications, patents, and patent applications mentioned in this specification are herein incorporated by reference to the same extent as if each individual publication, patent, or patent application was specifically and individually indicated to be incorporated by reference.

### BRIEF DESCRIPTION OF THE DRAWINGS

[0096] The novel features of the disclosure are set forth with particularity in the appended claims. A better understanding of the features and advantages of the present disclosure will be obtained by reference to the following detailed description that sets forth illustrative embodiments, in which the principles of the disclosure are utilized, and the accompanying drawings of which:

[0097] FIG. 1A-FIG. 1B depict a schematic representation of a target mRNA that contains a non-sense mediated mRNA decay-inducing exon (NMD exon mRNA) and therapeutic agent-mediated exclusion of the nonsense-mediated mRNA decay-inducing exon to increase expression of the full-length target protein or functional RNA. FIG. 1A shows a cell divided into nuclear and cytoplasmic compartments. In the nucleus, a pre-mRNA transcript of a target gene undergoes splicing to generate mRNA, and this mRNA is exported to the cytoplasm and translated into target protein. For this target gene, some fraction of the mRNA contains a nonsense-mediated mRNA decay-inducing exon (NMD exon mRNA) that is degraded in the cytoplasm, thus leading to no target protein production. FIG. 1B shows an example of the same cell divided into nuclear and cytoplasmic compartments. Treatment with a therapeutic agent, such as an antisense oligomer (ASO), promotes the exclusion of the nonsense-mediated mRNA decay-inducing exon and results in an increase in mRNA, which is in turn translated into higher levels of target protein.

[0098] FIG. 2 depicts an SETD5 NMD-inducing exon inclusion event. NMD-inducing Exon 5X: UCSC Genome Browser snapshot of a region in the SETD5 gene (exons are rectangles and introns are lines with arrowheads) that contains an NMD-inducing exon inclusion event (chr3 9434591 9434630) depicted by the shaded area and black bar on the top. The transcript shown is NM_001080517. RNA sequencing traces from human middle frontal gyrus samples from individuals at various ages and proliferating or differentiated RenCell VM cells treated with cycloheximide (CHX) or DMSO control are shown.

[0099] FIG. 3A-FIG. 3D depict validation of an exon inclusion event (Exon 5X). FIG. 3A is a schematic representation of an Exon 5× inclusion event. Exon 5 and Exon 6 refer to transcript NM_001080517. FIG. 3B shows RT-PCR results using RNA from SK-N-AS (neuroblastoma), ReNcell VM cells (Neural progenitor cells), or U87-MG (likely gliobastoma) treated with either DMSO (−) or cycloheximide (CHX) (+). Primers were positioned in Exons 5 and 6 of the transcript NM_001080517. FIG. 3C shows quantification of the RT-PCR products using RNA from various 2-month-old mouse brain regions plotted as a percentage of exon inclusion isoform (Exon inc/(Exon inc+productive mRNA)*100). FIG. 3D shows quantification of the RT-PCR products using RNA from various non-human primate brain regions plotted as percentage of exon inclusion isoform (Exon inc/(Exon inc +productive mRNA)*100).

[0100] FIG. 4 depicts ASO walk design. The shaded nucleotides correspond to Exon 5X. Figure discloses SEQ ID NOS 511-513, respectively, in order of appearance.

[0101] FIG. 5A-FIG. 5C depict ASO walk TaqMan qPCR results, i.e., ASO screening by TaqMan qPCR. FIG. 5A shows TaqMan qPCR using RNA from ReNcell VM cells 24 hours after they were nucleofected with 2 μM ASOs from region 1 depicted in FIG. 4. The TaqMan probe spans the Exon 5 and Exon 6 junction (based on the transcript NM_001080517) and measures productive mRNA. FIG. 5B shows TaqMan qPCR using RNA from ReNcell VM cells 24 hours after they were nucleofected with 2 μM ASOs from region 2 depicted in FIG. 4. The TaqMan probe spans the Exon 5 and Exon 6 junction (based on the transcript NM_001080517) and measures productive mRNA. FIG. 5C shows TaqMan qPCR using RNA from ReNcell VM cells nucleofected for 24 hours with 2 M ASOs from region 3 depicted in FIG. 4. The TaqMan probe spans the Exon 5 and Exon 6 junction (based on the transcript NM_001080517) and measures productive mRNA.

[0102] FIG. 6 depicts SETD5 NMD-inducing Exons 3× and 3Y inclusion events. UCSC Genome Browser snapshot of a region in the SETD5 gene (exons are rectangles and introns are lines with arrowheads) that contains NMD-inducing exon 3× (chr3 9429827 9430051) and NMD-inducing exon 3Y (chr3 9433370 9433562) depicted by the shaded area and black bar on the top. The transcript shown is NM_001080517. RNA sequencing traces from human middle frontal gyrus samples from individuals at various ages and proliferating ReNcell VM cells treated with cycloheximide (CHX) or DMSO control are shown.

[0103] FIG. 7A-FIG. 7D depict validation of Exons 3X and 3Y inclusion events. FIG. 7A shows schematic representation of Exons 3X and 3Y inclusion events. Exon 3 and Exon 4 refer to transcript NM_001080517. FIG. 7B shows RT-PCR results using RNA from SK-N-AS (neuroblastoma), ReNcell VM cells (Neural progenitor cells), or U87-MG (likely glioblastoma) treated with either DMSO (−) or cycloheximide (CHX) (+). Primers were positioned in Exons 3 and 4 of the transcript NM_001080517. FIG. 7C shows quantification of the RT-PCR products using RNA from various 2-month-old mouse brain regions plotted as percentage of exon inclusion isoform (Exon inc/(Exon inc+productive mRNA)*100). FIG. 7D shows quantification of the RT-PCR products using RNA from various non-human primate brain regions plotted as a percentage of exon inclusion isoform (Exon inc/(Exon inc +productive mRNA)*100).

[0104] FIG. 8 depicts ASO walk design for Exon 3X. The shaded nucleotides correspond to the Exon 3X. Figure discloses SEQ ID NOS 514-516, respectively, in order of appearance.

[0105] FIG. 9 depicts ASO walk design for Exon 3Y. The shaded nucleotides correspond to the Exon 3Y. Figure discloses SEQ ID NOS 517-519, respectively, in order of appearance.

[0106] FIG. 10 depicts ASO walk design for Exon 3. The shaded nucleotides correspond to the Exon 3. Figure discloses SEQ ID NOS 520-522, respectively, in order of appearance.

[0107] FIG. 11 shows the turning of SETD5 NMD exons into 5′UTR exons. The black boxes denote NMD exons. Exons that are half the height refer to exons that are not translated. Exons that are full height refer to exons that are translated.

[0108] FIG. 12 shows relative fold changes in the levels of SETD5 RNAs in response to the treatment of different exemplary ASOs according to some embodiments of the present disclosure or non-targeting ASO control (“NTC”), as compared to mock control, as assessed by TaqMan qPCR reactions that used primers spanning canonical Exon 5 and Exon 6 junction (“canonical (5-6)”), NMD Exon 5X (“NMD Exon (5X)”), and Exon 13 and Exon 14 junction (“Downstream (13-14)”).

[0109] FIGS. 13A and 13B show SETD5 protein expression level changes in response to ASO treatment, as measured by Jess Western blotting. Briefly, ReNcell VM cells were transfected with different exemplary ASOs according to some embodiments of the present disclosure, non-targeting ASO control (“NTC”), or no ASO (“mock control”), in the absence of cycloheximide. 72 hours after transfection, the cells were lysed, and the protein lysates were analyzed for impact on SETD5 protein expression by Jess Western blotting. FIG. 13A shows a representative Jess Western blot image of SETD5 protein in different experimental conditions, together with an image of total protein level as a loading control. FIG. 13B is a plot summarizing the fold change in SETD5 protein level as assessed by Jess Western blot and normalized to the total protein level. As shown in the figure, all tested ASOs were shown to increase the protein level of SETD5 in the cells.

[0110] FIG. 14 depicts the ASO macrowalk design for SETD5 Exon 5X.

[0111] FIGS. 15A-15B represent summative data at the 24-hour timepoint after nucleofection of HEK293 cells with 1 μM SETD5 macrowalk ASOs of FIG. 14. FIG. 15A shows a histogram representing the fold difference in target engagement of various ASOs from the SETD5 macrowalk relative to a mock control. FIG. 15B is a graph depicting the fold change of gene expression by various ASOs from the SETD5 macrowalk relative to a mock control.

[0112] FIGS. 16A-16B represent summative data at the 3-day timepoint after free-uptake of 20 M SETD5 macrowalk ASOs of FIG. 14 by HEK293 cells. FIG. 16A shows a histogram representing the fold difference in target engagement of various ASOs from the SETD5 macrowalk relative to control samples. FIG. 15B is a graph depicting the fold change of gene expression by various ASOs from the SETD5 macrowalk relative to control samples.

[0113] FIGS. 17A-17B illustrate summative data at the 24-hour timepoint after nucleofection of HEK293 cells with 0.5 M SETD5 macrowalk ASOs. FIG. 17A shows a histogram representing the percentage of SETD5 Exon 5X inclusion in HEK293 cells post application of various ASOs. FIG. 17B is a graph depicting the fold change of gene expression by various ASOs from the SETD5 macrowalk relative to control samples.

[0114] FIGS. 18A-18B represent summative data at the 3-day timepoint after free-uptake of 10 M SETD5 macrowalk ASOs by HEK293 cells. FIG. 18A shows a histogram representing the percentage of SETD5 Exon 5X inclusion in HEK293 cells post application of various ASOs. FIG. 18B is a graph depicting the fold change of gene expression by various ASOs from the SETD5 macrowalk relative to control samples.

[0115] FIGS. 19A-19B represent summative data at the 24-hour timepoint after nucleofection of HEK293 cells with 1 μM SETD5 microwalk ASOs. FIG. 19A shows a histogram representing the percentage of SETD5 Exon 5X inclusion in HEK293 cells post application of various ASOs relative to mock and SMN (SMN1 survival of motor neuron 1) targeting ASO controls. FIG. 19B is a graph representing the fold change of gene expression by various ASOs from a SETD5 microwalk relative to control samples.

[0116] FIGS. 20A-20B represent summative data at the 3-day timepoint after free-uptake of 20 μM SETD5 microwalk ASOs by HEK293 cells. FIG. 20A shows a histogram representing the percentage of SETD5 Exon 5X inclusion in HEK293 cells post application of various ASOs relative to mock and SMN controls. FIG. 20B is a graph representing the fold change of gene expression by various ASOs from a SETD5 microwalk relative to control samples.

### DETAILED DESCRIPTION

[0117] Certain specific details of this description are set forth in order to provide a thorough understanding of various embodiments. However, one skilled in the art will understand that the present disclosure may be practiced without these details. In other instances, well-known structures have not been shown or described in detail to avoid unnecessarily obscuring descriptions of the embodiments. Unless the context requires otherwise, throughout the specification and claims which follow, the word “comprise” and variations thereof, such as, “comprises” and “comprising” are to be construed in an open, inclusive sense, that is, as “including, but not limited to.” Further, headings provided herein are for convenience only and do not interpret the scope or meaning of the claimed disclosure.

[0118] As used in this specification and the appended claims, the singular forms “a,” “an,” and “the” include plural referents unless the content clearly dictates otherwise. It should also be noted that the term “or” is generally employed in its sense including “and/or” unless the content clearly dictates otherwise.

[0119] The coordinate as used herein refers to the coordinate of the genome reference assembly GRCh38 (Genome Research Consortium human build 38), also known as Hg38 (Human genome build 38).

[0120] Unless otherwise defined, all technical and scientific terms used herein have the same meaning as commonly understood by one of ordinary skill in the art to which this disclosure belongs. Although methods and materials similar or equivalent to those described herein can be used in the practice or testing of the present disclosure, suitable methods and materials are described below.

[0121] Alternative splicing events in SETD5 gene can lead to non-productive mRNA transcripts which in turn can lead to aberrant protein expression, and therapeutic agents which can target the alternative splicing events in SETD5 gene can modulate the expression level of functional proteins in DS patients and/or inhibit aberrant protein expression. Such therapeutic agents can be used to treat a condition caused by SETD5 protein deficiency.

[0122] One of the alternative splicing events that can lead to non-productive mRNA transcripts is the inclusion of an extra exon in the mRNA transcript that can induce non-sense mediated mRNA decay. The present disclosure provides compositions and methods for modulating alternative splicing of SETD5 to increase the production of protein-coding mature mRNA, and thus, translated functional SETD5 protein. These compositions and methods include antisense oligomers (ASOs) that can cause exon skipping and promote constitutive splicing of SETD5 pre-mRNA. In various embodiments, functional SETD5 protein can be increased using the methods of the disclosure to treat a condition caused by SETD5 protein deficiency.

[0123] “SETD5,” also known as SET domain containing 5, Histone-lysine N-methyltransferase SETD5, as referred to herein, includes any of the recombinant or naturally occurring forms of SETD5 protein or variants or homologs thereof that maintain SETD5 activity (e.g., within at least 40% 50%, 60%, 70%, 80%, 90%, 95%, 96%, 97%, 98%, 99% or 100% activity compared to SETD5). In some aspects, the variants or homologs have at least 40%, 45%, 50%, 55%, 60%, 65%, 70%, 75%, 80%, 85%, 90%, 95%, 96%, 97%, 98%, 99% or 100% amino acid sequence identity across the whole sequence or a portion of the sequence (e.g., a 50, 100, 150 or 200 continuous amino acid portion) compared to a naturally occurring SETD5 protein. In some embodiments, the SETD5 protein is substantially identical to the protein identified by the UniProt reference number Q9C0A6 or a variant or homolog having substantial identity thereto.

Splicing and Nonsense-Mediated mRNA Decay

[0124] Intervening sequences or introns are removed by a large and highly dynamic RNA-protein complex termed the spliceosome, which orchestrates complex interactions between primary transcripts, small nuclear RNAs (snRNAs) and a large number of proteins. Spliceosomes assemble ad hoc on each intron in an ordered manner, starting with recognition of the 5′ splice site (5′ss) by U1 snRNA or the 3′splice site (3′ss) by the U2 pathway, which involves binding of the U2 auxiliary factor (U2AF) to the 3′ss region to facilitate U2 binding to the branch point sequence (BPS). U2AF is a stable heterodimer composed of a U2AF2-encoded 65-kD subunit (U2AF65), which binds the polypyrimidine tract (PPT), and a U2AF1-encoded 35-kD subunit (U2AF35), which interacts with highly conserved AG dinucleotides at 3′ss and stabilizes U2AF65 binding. In addition to the BPS/PPT unit and 3′ss/5′ss, accurate splicing requires auxiliary sequences or structures that activate or repress splice site recognition, known as intronic or exonic splicing enhancers or silencers. These elements allow genuine splice sites to be recognized among a vast excess of cryptic or pseudo-sites in the genome of higher eukaryotes, which have the same sequences but outnumber authentic sites by an order of magnitude. Although they often have a regulatory function, the exact mechanisms of their activation or repression are poorly understood.

[0125] The decision of whether to splice or not to splice can be typically modeled as a stochastic rather than deterministic process, such that even the most defined splicing signals can sometimes splice incorrectly. However, under normal conditions, pre-mRNA splicing proceeds at surprisingly high fidelity. This is attributed in part to the activity of adjacent cis-acting auxiliary exonic and intronic splicing regulatory elements (ESRs or ISRs). Typically, these functional elements are classified as either exonic or intronic splicing enhancers (ESEs or ISEs) or silencers (ESSs or ISSs) based on their ability to stimulate or inhibit splicing, respectively. Although there is now evidence that some auxiliary cis-acting elements may act by influencing the kinetics of spliceosome assembly, such as the arrangement of the complex between U1 snRNP and the 5′ss, it seems very likely that many elements function in concert with trans-acting RNA-binding proteins (RBPs). For example, the serine- and arginine-rich family of RBPs (SR proteins) is a conserved family of proteins that have a key role in defining exons. SR proteins promote exon recognition by recruiting components of the pre-spliceosome to adjacent splice sites or by antagonizing the effects of ESSs in the vicinity. The repressive effects of ESSs can be mediated by members of the heterogeneous nuclear ribonucleoprotein (hnRNP) family and can alter recruitment of core splicing factors to adjacent splice sites. In addition to their roles in splicing regulation, silencer elements are suggested to have a role in repression of pseudo-exons, sets of decoy intronic splice sites with the typical spacing of an exon but without a functional open reading frame. ESEs and ESSs, in cooperation with their cognate trans-acting RBPs, represent important components in a set of splicing controls that specify how, where and when mRNAs are assembled from their precursors.

[0126] The sequences marking the exon-intron boundaries are degenerate signals of varying strengths that can occur at high frequency within human genes. In multi-exon genes, different pairs of splice sites can be linked together in many different combinations, creating a diverse array of transcripts from a single gene. This is commonly referred to as alternative pre-mRNA splicing. Although most mRNA isoforms produced by alternative splicing can be exported from the nucleus and translated into functional polypeptides, different mRNA isoforms from a single gene can vary greatly in their translation efficiency.

[0127] Those mRNA isoforms with premature termination codons (PTCs) at least 50 bp upstream of an exon junction complex are likely to be targeted for degradation by the nonsense-mediated mRNA decay (NMD) pathway. Mutations in traditional (BPS/PPT/3′ss/5′ss) and auxiliary splicing motifs can cause aberrant splicing, such as exon skipping or cryptic (or pseudo-) exon inclusion or splice-site activation and contribute significantly to human morbidity and mortality. Both aberrant and alternative splicing patterns can be influenced by natural DNA variants in exons and introns.

[0128] Given that exon-intron boundaries can occur at any of the three positions of a codon, it is clear that only a subset of alternative splicing events can maintain the canonical open reading frame. For example, only exons that are evenly divisible by 3 can be skipped or included in the mRNA without any alteration of reading frame. Splicing events that do not have compatible phases will induce a frame-shift. Unless reversed by downstream events, frame-shifts can certainly lead to one or more PTCs, probably resulting in subsequent degradation by NMD. NMD is a translation-coupled mechanism that eliminates mRNAs containing PTCs. NMD can function as a surveillance pathway that exists in all eukaryotes. NMD can reduce errors in gene expression by eliminating mRNA transcripts that contain premature stop codons. Translation of these aberrant mRNAs could, in some cases, lead to deleterious gain-of-function or dominant-negative activity of the resulting proteins. NMD targets not only transcripts with PTCs but also a broad array of mRNA isoforms expressed from many endogenous genes, suggesting that NMD is a master regulator that drives both fine and coarse adjustments in steady-state RNA levels in the cell.

[0129] The terms “non-sense mediated RNA decay exon” (or “NSE” or “NMD exon”) and “NMD-inducing exon” (or NIE) used interchangeably and can refer to an exon (e.g., a noncanonical exon) that can activate the NMD pathway if present in a mature RNA transcript. A fully processed mRNA that contains an NMD exon can be subject to non-sense mediated degradation (NMD). In constitutive splicing events, the intron containing an NMD exon is usually spliced out, but the intron or a portion thereof (e.g., NMD exon) may be retained during alternative or aberrant splicing events. Mature mRNA transcripts containing an NMD exon may be non-productive, for example, due to frame shifts which induce the NMD pathway. A mature mRNA transcript that contains an NMD exon can contain a premature stop codon (or premature termination codon (PTC)). In some embodiments, a mature mRNA transcript containing an NMD exon contains a premature stop codon (or premature termination codon (PTC)) downstream of the NMD exon. In some embodiments, an NMD exon is an exon that contains a premature stop codon (or premature termination codon (PTC)) or other sequences that facilitate degradation of a mature RNA transcript containing the NMD exon. Inclusion of a NMD exon in mature RNA transcripts may downregulate gene expression. An NMD exon can be within an intron of a pre-mRNA. In some embodiments, an NMD exon is a region within an intron (e.g., a canonical intron). In some embodiments, an NMD exon is downstream from a translation start site. For example, an NMD exon can be an exon downstream of an exon containing a translation start site (e.g., a first translation start site). In some embodiments, an NMD exon is not an exon that contains a translation start site. In some embodiments, an NMD exon is an exon in a 5′ UTR.

[0130] The terms “mature mRNA,” and “fully-spliced mRNA,” are used interchangeably herein to describe a fully processed mRNA. A mature mRNA that contains an NMD exon can be non-productive mRNA and lead to NMD of the mature mRNA. NMD exon containing mature mRNA may sometimes lead to reduced protein expression compared to protein expression from a corresponding mature mRNA that does not contain the NMD exon.

[0131] In some embodiments, the compositions as described herein or the methods as described herein increase protein expression by increasing productive RNA production. In some embodiments, by the compositions as described herein or the methods as described herein, translation starts at the second translation start site that is downstream of NMD causing events by skipping the exon containing the first translation start site that is upstream of NMD causing events. In some embodiments, the compositions as described herein or the methods as described herein shift the translation start site from the first translation initiation site to the second translation initiation site. In some embodiments, the compositions as described herein or the methods as described herein transform the exon containing the first translation start site that is upstream of NMD causing events to the UTR (untranslated region). In some embodiments, the compositions as described herein or the methods as described herein transform the exon containing the first translation start site that is upstream of NMD causing events to the 5′-UTR. In some embodiments, the compositions as described herein or the methods as described herein lead to skipping an upstream ORF (open reading frame) to start translation downstream of NMD causing events to avoid inclusion of PTC-containing exons. In some embodiments, the compositions as described herein or the methods as described herein lead to shifting translation start sites to avoid NMD exons. In some embodiments, the compositions as described herein or the methods as described herein lead to skipping an exon upstream of a NMD exon, wherein there is a translation start site downstream of the NMD exon.

[0132] In some embodiments, the protein translated from the second translation start site has the activity same as or comparable to the protein translated from the first translation start site. In some embodiments, the protein translated from the second translation start site has the activity within at least 40% 50%, 60%, 70%, 80%, 90%, 95%, 96%, 97%, 98%, 99% or 100% activity compared to the protein translated from the first translation start site.

[0133] The “translation start site” or “translation initiation site” as used herein refers to the location where translation into protein starts. The start codon is the first codon of a messenger RNA (mRNA) transcript translated by a ribosome. The start codon codes for methionine in eukaryotes and Archaea, and a N-formylmethionine (fMet) in bacteria, mitochondria, and plastids. In some embodiments, the start codon is preceded by a 5′ untranslated region (5′ UTR).

[0134] Pseudo splice sites have the same splicing recognition sequences as genuine splice sites but are not used in splicing reactions. They outnumber genuine splice sites in the human genome by an order of a magnitude and are normally repressed by thus far poorly understood molecular mechanisms. Cryptic 5′ splice sites have the consensus NNN/GUNNNN or NNN/GCNNNN where N is any nucleotide and/is the exon-intron boundary. Cryptic 3′ splice sites have the consensus NAG/N. Their activation is positively influenced by surrounding nucleotides that make them more similar to the optimal consensus of authentic splice sites, namely MAG/GURAGU and YAG/G, respectively, where M is C or A, R is G or A, and Y is C or U.

[0135] Splice sites and their regulatory sequences can be readily identified by a skilled person using suitable algorithms publicly available, listed, for example, in Kralovicova, J. and Vorechovsky, I. (2007) Global control of aberrant splice site activation by auxiliary splicing sequences: evidence for a gradient in exon and intron definition. Nucleic Acids Res., 35, 6399-6413, (nebi.nlm.nih.gov/pmc/articles/PMC2095810/pdf/gkm680.pdf)

### Target Genes

[0136] The present disclosure provides compositions and methods for modulating alternative splicing of a target to modulate the production of functional protein-coding mature mRNA, and thus, translated functional the target protein, wherein the target is SETD5. These compositions and methods include antisense oligomers (ASOs) that can promote canonical splicing of the target pre-mRNA, wherein the target is SETD5. In various embodiments, functional target protein can be increased using the methods of the disclosure to treat a condition caused by target protein deficiency, wherein the target is any one selected from the group consisting of SETD5.

In some embodiments, the methods of the invention are used to increase functional the target protein production to treat a condition in a subject in need thereof, wherein the target gene is SETD5 gene. In some embodiments, the subject has a condition in which the target protein is not necessarily deficient relative to wild-type, but where an increase in the target protein mitigates the condition nonetheless, wherein the target gene is SETD5 gene. In some embodiments, the condition is caused by sporadic mutation. In some embodiments, the methods of the invention are used to reduce functional target protein production to treat a condition in a subject in need thereof, wherein the target gene is SETD5 gene. In some embodiments, the methods of the invention are used to modulate functional target protein production to treat a condition in a subject in need thereof, wherein the target is gene is SETD5 gene.

### Target Transcripts

[0137] In some embodiments, the methods of the present disclosure exploit the presence of NIE in the pre-mRNA transcribed from SETD5 genes. Splicing of the identified SETD5 NIE pre-mRNA species to produce functional mature SETD5 mRNA may be induced using a therapeutic agent such as an ASO that stimulates exon skipping of an NIE. Induction of exon skipping may result in inhibition of an NMD pathway. The resulting mature SETD5 mRNA can be translated normally without activating NMD pathway, thereby increasing the amount of SETD5 protein in the patient's cells and alleviating symptoms of a condition or disease associated with SETD5 deficiency, such as an intellectual disability or an autism spectrum disease. the disease or condition is selected from the group consisting of: autism; mental retardation; mental retardation, autosomal dominant 23 (mrd23, autosomal dominant non-syndromic intellectual disability 23; autosomal dominant mental retardation 23; intellectual disability-facial dysmorphism syndrome due to setd5 haploinsufficiency; mental retardation, autosomal dominant, type 23); Cornelia De Lange Syndrome (cdls, typus degenerativus amstelodamensis, de lange syndrome, brachmann-de lange syndrome, bdls, brachmann de lange syndrome); alacrima, achalasia, and mental retardation syndrome (aamr, intellectual disability); chromosome 3pter-p25 deletion syndrome (3p-syndrome; 3p deletion syndrome; distal monosomy 3p; chromosome 3p-syndrome; chromosome 3, monosomy 3p25; del syndrome; deletion 3p25; distal 3p deletion; monosomy 3pter; telomeric monosomy 3p; partial monosomy 3p; 3p partial monosomy syndrome; chromo-some 3, deletion 3p; chromosome 3, monosomy 3p; chromosome 3p deletion syndrome; deletion 3p; monosomy 3p; deletion syndrome, chromosome 3pter-p25NK-cell enteropathy); and mental retardation, autosomal dominant 21 (mrd21; autosomal dominant non-syndromic intellectual disability 21; autosomal dominant mental retardation 21; intellectual disability-feeding difficulties-developmental delay-microcephaly syndrome; mental retardation, autosomal dominant, type 21).

[0138] Canonical splicing of the identified target NSAE (non-sense mediated RNA decay alternative exon) from pre-mRNA transcripts to produce the functional, mature target mRNA can be induced using a therapeutic agent, such as an ASO, that promotes constitutive splicing of the target NSAE pre-mRNA at the canonical splice sites. In some embodiments, the resulting functional, mature target mRNA can be translated normally, thereby increasing the amount of the functional target protein in the patient's cells and preventing symptoms of the target associated disease. In some embodiments, canonical splicing of the identified target NSAE pre-mRNA transcripts to produce functional, mature target mRNA may be reduced using a therapeutic agent, such as an ASO, that inhibits constitutive splicing of target NSAE pre-mRNA at the canonical splice sites. In some embodiments, the resulting functional, mature target mRNA can be translated abnormally, thereby decreasing the amount of functional target protein in the patient's cells and preventing symptoms of the target associated disease.

[0139] In some embodiments, the diseases or conditions that can be treated or ameliorated using the method or composition disclosed herein are not directly associated with the target protein (gene) that the therapeutic agent targets. In some embodiments, a therapeutic agent provided herein can target a protein (gene) that is not directly associated with a disease or condition, but the modulation of expression of the target protein (gene) can treat or ameliorate the disease or condition. For instance, targeting genes like SETD5 by a therapeutic agent provided herein can treat or ameliorate can treat or ameliorate central nervous system diseases. For instance, targeting genes like SETD5 by a therapeutic agent provided herein can treat or ameliorate intellectual disability or an autism spectrum disease. In some embodiments, targeting genes like SETD5 by a therapeutic agent provided herein can treat or ameliorate a disease or condition selected from the group consisting of: autism; mental retardation; mental retardation, autosomal dominant 23 (mrd23, autosomal dominant non-syndromic intellectual disability 23; autosomal dominant mental retardation 23; intellectual disability-facial dysmorphism syndrome due to setd5 haploinsufficiency; mental retardation, autosomal dominant, type 23); Cornelia De Lange Syndrome (cdls, typus degenerativus amstelodamensis, de lange syndrome, brachmann-de lange syndrome, bdls, brachmann de lange syndrome); alacrima, achalasia, and mental retardation syndrome (aamr, intellectual disability); chromosome 3pter-p25 deletion syndrome (3p-syndrome; 3p deletion syndrome; distal monosomy 3p; chromosome 3p-syndrome; chromosome 3, monosomy 3p25; del syndrome; deletion 3p25; distal 3p deletion; monosomy 3pter; telomeric monosomy 3p; partial monosomy 3p; 3p partial monosomy syndrome; chromo-some 3, deletion 3p; chromosome 3, monosomy 3p; chromosome 3p deletion syndrome; deletion 3p; monosomy 3p; deletion syndrome, chromosome 3pter-p25NK-cell enteropathy); and mental retardation, autosomal dominant 21 (mrd21; autosomal dominant non-syndromic intellectual disability 21; autosomal dominant mental retardation 21; intellectual disability-feeding difficulties-developmental delay-microcephaly syndrome; mental retardation, autosomal dominant, type 21). In some embodiments, such target genes like SETD5 are said to be indicated for Pathway (central nervous system). In some embodiments, such target genes like SETD5 are said to be indicated for Pathway (intellectual disability or an autism spectrum disease). In some embodiments, such target genes like SETD5 are said to be indicated for Pathway (autism; mental retardation; mental retardation, autosomal dominant 23 (mrd23, autosomal dominant non-syndromic intellectual disability 23; autosomal dominant mental retardation 23; intellectual disability-facial dysmorphism syndrome due to setd5 haploinsufficiency; mental retardation, autosomal dominant, type 23); Cornelia De Lange Syndrome (cdls, typus degenerativus amstelodamensis, de lange syndrome, brachmann-de lange syndrome, bdls, brachmann de lange syndrome); alacrima, achalasia, and mental retardation syndrome (aamr, intellectual disability); chromosome 3pter-p25 deletion syndrome (3p-syndrome; 3p deletion syndrome; distal monosomy 3p; chromosome 3p-syndrome; chromosome 3, monosomy 3p25; del syndrome; deletion 3p25; distal 3p deletion; monosomy 3pter; telomeric monosomy 3p; partial monosomy 3p; 3p partial monosomy syndrome; chromo-some 3, deletion 3p; chromosome 3, monosomy 3p; chromosome 3p deletion syndrome; deletion 3p; monosomy 3p; deletion syndrome, chromosome 3pter-p25NK-cell enteropathy); and mental retardation, autosomal dominant 21 (mrd21; autosomal dominant non-syndromic intellectual disability 21; autosomal dominant mental retardation 21; intellectual disability-feeding difficulties-developmental delay-microcephaly syndrome; mental retardation, autosomal dominant, type 21)).

[0140] In various embodiments, the present disclosure provides a therapeutic agent which can target SETD5 mRNA transcripts to modulate splicing or protein expression level. The therapeutic agent can be a small molecule, polynucleotide, or polypeptide. In some embodiments, the therapeutic agent is an ASO. Various regions or sequences on the SETD5 pre-mRNA can be targeted by a therapeutic agent, such as an ASO. In some embodiments, the ASO targets a SETD5 pre-mRNA transcript containing an NIE. In some embodiments, the ASO targets a sequence within an NIE of a SETD5 pre-mRNA transcript. In some embodiments, the ASO targets a sequence upstream (or 5′) from the 5′ end of an NIE (3′ss) of a SETD5 pre-mRNA transcript. In some embodiments, the ASO targets a sequence downstream (or 3′) from the 3′ end of an NIE (5′ss) of a SETD5 pre-mRNA transcript. In some embodiments, the ASO targets a sequence that is within an intron flanking on the 5′ end of the NIE of a SETD5 pre-mRNA transcript. In some embodiments, the ASO targets a sequence that is within an intron flanking the 3′ end of the NIE of a SETD5 pre-mRNA transcript. In some embodiments, the ASO targets a sequence comprising an NIE-intron boundary of a SETD5 pre-mRNA transcript. An NIE-intron boundary can refer to the junction of an intron sequence and an NIE region. The intron sequence can flank the 5′ end of the NIE, or the 3′ end of the NIE. In some embodiments, the ASO targets a sequence within an exon of a SETD5 pre-mRNA transcript. In some embodiments, the ASO targets a sequence within an intron of a SETD5 pre-mRNA transcript. In some embodiments, the ASO targets a sequence comprising both a portion of an intron and a portion of an exon of a SETD5 pre-mRNA transcript.

[0141] In some embodiments, the ASO targets a sequence about 4 to about 300 nucleotides upstream (or 5′) from the 5′ end of the NIE. In some embodiments, the ASO targets a sequence about 1 to about 20 nucleotides, about 20 to about 50 nucleotides, about 50 to about 100 nucleotides, about 100 to about 150 nucleotides, about 150 to about 200 nucleotides, about 200 to about 250 nucleotides, or about 250 to about 300 nucleotides upstream (or 5′) from the 5′ end of the NIE region. In some embodiments, the ASO may target a sequence more than 300 nucleotides upstream from the 5′ end of the NIE. In some embodiments, the ASO targets a sequence about 4 to about 300 nucleotides downstream (or 3′) from the 3′ end of the NIE. In some embodiments, the ASO targets a sequence about 1 to about 20 nucleotides, about 20 to about 50 nucleotides, about 50 to about 100 nucleotides, about 100 to about 150 nucleotides, about 150 to about 200 nucleotides, about 200 to about 250 nucleotides, or about 250 to about 300 nucleotides downstream from the 3′ end of the NIE. In some embodiments, the ASO targets a sequence more than 300 nucleotides downstream from the 3′ end of the NIE.

[0142] In some embodiments, the ASOs disclosed herein target a NSAE pre-mRNA transcribed from SETD5 genomic sequence. In some embodiments, the ASO targets a NSAE pre-mRNA transcript from a genomic sequence comprising a NSAE exon of SETD5 genomic sequences. In some embodiments, the ASO targets a NSAE pre-mRNA transcript from a genomic sequence comprising an intron flanking the 3′ splice site of the NSAE exon and an intron flanking the 5′ splice site of a NSAE exon of SETD5 genomic sequences. In some embodiments, the ASO targets a NSAE pre-mRNA transcript comprising a sequence selected from the group consisting of the pre-mRNA transcripts of Table 3 (e.g., the sequence set forth in any one of SEQ ID NO: 340-403). In some embodiments, the ASO targets a pre-mRNA sequence comprising a NSAE exon of SETD5 pre-mRNA sequences. In some embodiments, the ASO targets a pre-mRNA sequence comprising an intron flanking the 3′ splice site of the NSAE exon of SETD5 pre-mRNA sequences. In some embodiments, the ASO targets a pre-mRNA sequence comprising an intron flanking the 5′ splice site of the NSAE exon of SETD5 pre-mRNA sequences. In some embodiments, the transcript is selected from the group consisting of the transcripts of Table 3 (e.g., the sequence set forth in any one of SEQ ID NO: 340-403).

[0143] In some embodiments, the SETD5 NIE containing pre-mRNA transcript is encoded by a genetic sequence with at least about 80%, 85%, 90%, 95%, 96%, 97%, 98%, 99% or 100% sequence identity to any one of the sequences listed in Table 2 or Table 3 (e.g., the sequence set forth in any one of SEQ ID NO: 332-403). In some embodiments, the SETD5 NIE pre-mRNA transcript comprises a sequence with at least about 80%, 85%, 90%, 95%, 96%, 97%, 98%, 99% or 100% sequence identity to any one of the sequences listed in Table 2 or Table 3 (e.g., the sequence set forth in any one of SEQ ID NO: 332-403).

[0144] In some embodiments, the SETD5 NIE containing pre-mRNA transcript (or NMD exon mRNA) comprises a sequence with at least about 80%, 85%, 90%, 95%, 97%, or 100% sequence identity to any one of the sequences listed in Table 2 or Table 3 (e.g., the sequence set forth in any one of SEQ ID NO: 332-403). In some embodiments, SETD5 NIE containing pre-mRNA transcript (or NMD exon mRNA) is encoded by a sequence with at least about 80%, 85%, 90%, 95%, 97%, or 100% sequence identity to any one of the sequences listed in Table 2 or Table 3 (e.g., the sequence set forth in any one of SEQ ID NO: 332-403). In some embodiments, the targeted portion of the NMD exon mRNA comprises a sequence with at least 80%, 85%, 90%, 95%, 97%, or 100% sequence identity to a region comprising at least 8 contiguous nucleic acids of any one of the sequences listed in Table 2 or Table 3 (e.g., the sequence set forth in any one of SEQ ID NO: 332-403).

[0145] In some embodiments, the pre-mRNA transcript comprises a sequence with at least about 80%, 85%, 90%, 95%, 96%, 97%, 98%, 99% or 100% sequence identity to a pre-mRNA transcript of SETD5 pre-mRNA transcripts or a complement thereof described herein. In some embodiments, the targeted portion of the pre-mRNA selected from the group consisting of SETD5 pre-mRNAs comprises a sequence with at least 80%, 85%, 90%, 95%, 97%, or 100% sequence identity to a region comprising at least 8 contiguous nucleotides of a sequence of the pre-mRNA transcripts of Table 2 or Table 3 (e.g., the sequence set forth in any one of SEQ ID NO: 332-403) or complements thereof. In some embodiments, the targeted portion of the pre-mRNA of SETD5 pre-mRNA comprises a sequence that is complementary to at least 8, 9, 10, 11, 12, 13, 14, 15, 16, 17, 18, 19 or 20 contiguous nucleic acids of a sequence of Table 2 or Table 3 (e.g., the sequence set forth in any one of SEQ ID NO: 332-403) or a complement thereof.

[0146] In some embodiments, the pre-mRNA transcript comprises a sequence with at least about 80%, 85%, 90%, 95%, 96%, 97%, 98%, 99% or 100% sequence identity to a pre-mRNA transcript of SETD5 pre-mRNA transcripts or a complement thereof described herein. In some embodiments, the targeted portion of the pre-mRNA selected from the group consisting of SETD5 pre-mRNAs comprises a sequence with at least 80%, 85%, 90%, 95%, 97%, or 100% sequence identity to a region comprising at least 8 contiguous nucleotides of a sequence of the pre-mRNA transcripts of Table 2 or Table 3 (e.g., the sequence set forth in any one of SEQ ID NO: 332-403) or complements thereof. In some embodiments, the targeted portion of the pre-mRNA of SETD5 pre-mRNA comprises a sequence that is complementary to at least 8, 9, 10, 11, 12, 13, 14, 15, 16, 17, 18, 19 or 20 contiguous nucleic acids of a sequence of Table 2 or Table 3 (e.g., the sequence set forth in any one of SEQ ID NO: 332-403) or a complement thereof.

[0147] In some embodiments, the ASOs disclosed herein target a NSAE pre-mRNA transcribed from a SETD5 genomic sequence. In some embodiments, the ASO targets a NSAE pre-mRNA transcript from a SETD5 genomic sequence comprising a NSAE exon.

[0148] In some embodiments, the SETD5 pre-mRNA transcript is encoded by a genetic sequence with at least about 80%, 85%, 90%, 95%, 96%, 97%, 98%, 99% or 100% sequence identity to the Ensembl reference number ENSG00000168137.18 or a complement thereof. In some embodiments, the SETD5 pre-mRNA transcript comprises a sequence with at least about 80%, 85%, 90%, 95%, 96%, 97%, 98%, 99% or 100% sequence identity to a SETD5 pre-mRNA transcript or a complement thereof described herein.

[0149] In some embodiments, the targeted portion of the SETD5 pre-mRNA comprises a sequence with at least 80%, 85%, 90%, 95%, 97%, or 100% sequence identity to a region comprising at least 8 contiguous nucleotides of a sequence of sequence of Table 3 (e.g., the sequence set forth in any one of SEQ ID NO: 340-403) or complements thereof. In some embodiments, the targeted portion of the SETD5 pre-mRNA comprises a sequence with at least 80%, 85%, 90%, 95%, 97%, or 100% sequence identity to a region comprising at least 8 contiguous nucleotides of a sequence selected from the group consisting of sequences listed in Table 2 or Table 3 (e.g., the sequence set forth in any one of SEQ ID NO: 332-403) or complements thereof. In some embodiments, the ASO comprises a sequence that is at least about 80%, 85%, 90%, 95%, 97%, or 100% identical to any one the sequences of Table 4 (e.g., the sequence set forth in any one of SEQ ID NO: 1-331) or complements thereof.

[0150] In some embodiments, the ASO targets Exon 5X of a SETD5 pre-mRNA. In some embodiments, the ASO targets exon 3X and exon 3Y of a SETD5 pre-mRNA. In some embodiments, the ASO targets exon 3X or exon 3Y of a SETD5 pre-mRNA. In some embodiments, the ASO targets exon 3X of a SETD5 pre-mRNA. In some embodiments, the ASO targets exon 3Y of a SETD5 pre-mRNA.

[0151] In some embodiments, the ASO targets exon (GRCh38/hg38: chr3 9429827 9430051), exon (GRCh38/hg38: chr3 9433370 9433562), exon (GRCh38/hg38: chr3 9434591 9434630) or exon (GRCh38/hg38: chr3 9428823 9429009) of SETD5.

[0152] In some embodiments, the ASO targets a sequence about 1500 nucleotides, about 1000 nucleotides, about 800 nucleotides, about 700 nucleotides, about 600 nucleotides, about 500 nucleotides, about 400 nucleotides, about 300 nucleotides, about 200 nucleotides, about 100 nucleotides, about 80 nucleotides, about 70 nucleotides, about 60 nucleotides, about 50 nucleotides upstream (or 5′) from the 5′ end of Exon 5X, exon 3X, or exon 3Y, of SETD5. In some embodiments, the ASO targets a sequence about 1500 nucleotides, about 1000 nucleotides, about 800 nucleotides, about 700 nucleotides, about 600 nucleotides, about 500 nucleotides, about 400 nucleotides, about 300 nucleotides, about 200 nucleotides, about 100 nucleotides, about 80 nucleotides, about 70 nucleotides, about 60 nucleotides, about 50 nucleotides upstream (or 5′) from GRCh38/hg38: chr3 9429827 9430051, GRCh38/hg38: chr3 9433370 9433562, GRCh38/hg38: chr3 9434591 9434630 or GRCh38/hg38: chr3 9428823 9429009 of SETD5.

[0153] In some embodiments, the ASO targets a sequence about 1500 nucleotides, about 1000 nucleotides, about 800 nucleotides, about 700 nucleotides, about 600 nucleotides, about 500 nucleotides, about 400 nucleotides, about 300 nucleotides, about 200 nucleotides, about 100 nucleotides, about 80 nucleotides, about 70 nucleotides, about 60 nucleotides, about 50 nucleotides downstream (or 3′) from the 3′ end of Exon 5X, exon 3X, or exon 3Y of SETD5. In some embodiments, the ASO targets a sequence about 1500 nucleotides, about 1000 nucleotides, about 800 nucleotides, about 700 nucleotides, about 600 nucleotides, about 500 nucleotides, about 400 nucleotides, about 300 nucleotides, about 200 nucleotides, about 100 nucleotides, about 80 nucleotides, about 70 nucleotides, about 60 nucleotides, about 50 nucleotides downstream (or 3′) from GRCh38/hg38: chr3 9429827 9430051, GRCh38/hg38: chr3 9433370 9433562, GRCh38/hg38: chr3 9434591 9434630 or GRCh38/hg38: chr3 9428823 9429009 of SETD5.

[0154] In some embodiments, the ASO has a sequence complementary to the targeted portion of the NMD exon mRNA according to any one of the sequences listed in Table 2 or Table 3 (e.g., the sequence set forth in any one of SEQ ID NO: 332-403).

[0155] In some embodiments, the ASO targets a sequence upstream from the 5′ end of an NIE. For example, ASOs targeting a sequence upstream from the 5′ end of an NIE (e.g., Exon 5X, exon 3X, exon 3Y, of SETD5) comprises a sequence that is at least about 80%, 85%, 90%, 95%, 97%, or 100% complimentary to at least 8 contiguous nucleic acids of any one of the sequences listed in Table 2 or Table 3 (e.g., the sequence set forth in any one of SEQ ID NO: 332-403). For example, ASOs targeting a sequence upstream from the 5′ end of an NIE (e.g., exon (GRCh38/hg38: chr3 9429827 9430051), exon (GRCh38/hg38: chr3 9433370 9433562), exon (GRCh38/hg38: chr3 9434591 9434630) or exon (GRCh38/hg38: chr3 9428823 9429009) of SETD5) can comprise a sequence with at least 80%, 85%, 90%, 95%, 97%, or 100% sequence identity to any one of the sequences listed in Table 2 or Table 3 (e.g., the sequence set forth in any one of SEQ ID NO: 332-403).

[0156] In some embodiments, the ASOs target a sequence containing an exon-intron boundary (or junction). For example, ASOs targeting a sequence containing an exon-intron boundary can comprise a sequence that is at least about 80%, 85%, 90%, 95%, 97%, or 100% complimentary to at least 8 contiguous nucleic acids of any one of the sequences listed in Table 2 or Table 3 (e.g., the sequence set forth in any one of SEQ ID NO: 332-403). In some embodiments, the ASOs target a sequence downstream from the 3′ end of an NIE. For example, ASOs targeting a sequence downstream from the 3′ end of an NIE (e.g., Exon 5X, exon 3X, exon 3Y, of SETD5) can comprise a sequence with at least 80%, 85%, 90%, 95%, 97%, or 100% sequence identity to any one of the sequences listed in Table 2 or Table 3 (e.g., the sequence set forth in any one of SEQ ID NO: 332-403). For example, ASOs targeting a sequence downstream from the 3′ end of an NIE (e.g., exon (GRCh38/hg38: chr3 9429827 9430051), exon (GRCh38/hg38: chr3 9433370 9433562), exon (GRCh38/hg38: chr3 9434591 9434630) or exon (GRCh38/hg38: chr3 9428823 9429009) of SETD5) can comprise a sequence with at least 80%, 85%, 90%, 95%, 97%, or 100% sequence identity to any one of the sequences listed in Table 2 or Table 3 (e.g., the sequence set forth in any one of SEQ ID NO: 332-403). In some embodiments, ASOs target a sequence within an NIE.

[0157] In some embodiments, the ASO targets Exon 5X of a SETD5 NIE containing pre-mRNA comprising NIE Exon 5X, exon 3X of a SETD5 NIE containing pre-mRNA comprising NIE exon 3X, or exon 3Y of a SETD5 NIE containing pre-mRNA comprising NIE exon 3Y. In some embodiments, the ASO targets a sequence downstream (or 3′) from the 5′ end of Exon 5X, exon 3X, or exon 3Y of SETD5 pre-mRNA. In some embodiments, the ASO targets an exon sequence upstream (or 5′) from the 3′ end of Exon 5X, exon 3X or exon 3Y of SETD5 pre-mRNA.

[0158] In some embodiments, the targeted portion of the SETD5 NIE containing pre-mRNA is in intron 1, 2, 3, 4, 5, 6, 7, 8, 9, 10, 11, 12, 13, 14, 15, 16, 17, 18, 19, 20, 21, 22, 23, 24, 25, 26, 27, 28, 29, 30, 31, 32, 33, 34, 35, 36, 37, 38, 39, 40, 41, 42, 43, 44, 45, 46, 47, 48, 49, or 50. In some embodiments, hybridization of an ASO to the targeted portion of the NIE pre-mRNA results in exon skipping of at least one of NIE within intron 1, 2, 3, 4, 5, 6, 7, 8, 9, 10, 11, 12, 13, 14, 15, 16, 17, 18, 19, 20, 21, 22, 23, 24, 25, 26, 27, 28, 29, 30, 31, 32, 33, 34, 35, 36, 37, 38, 39, 40, 41, 42, 43, 44, 45, 46, 47, 48, 49, or 50, and subsequently increases SETD5 protein production. In some embodiments, the targeted portion of the SETD5 NIE containing pre-mRNA is in canonical intron 5 or canonical intron 3 of SETD5. In some embodiments, the targeted portion of the SETD5 NIE containing pre-mRNA is intron (GRCh38/hg38:chr3 9434486 9434823) or intron (GRCh38/hg38: chr3 9429010 9433844) of SETD5.

[0159] In some embodiments, the methods and compositions of the present disclosure are used to increase the expression of SETD5 by inducing exon skipping of a NMD exon of an SETD5 NIE containing pre-mRNA. In some embodiments, the NMD exon is a sequence within any of introns 1-50. In some embodiments, the NMD exon is a sequence within any of introns 1, 2, 3, 4, 5, 6, 7, 8, 9, 10, 11, 12, 13, 14, 15, 16, 17, 18, 19, 20, 21, 22, 23, 24, 25, 26, 27, 28, 29, 30, 31, 32, 33, 34, 35, 36, 37, 38, 39, 40, 41, 42, 43, 44, 45, 46, 47, 48, 49, or 50. In some embodiments, the NMD exon can be any SETD5 intron or a portion thereof. In some embodiments, the NMD exon is within canonical intron 5 or canonical intron 3 of SETD5. In some embodiments, the NMD exon is within intron (GRCh38/hg38:chr3 9434486 9434823) or intron (GRCh38/hg38: chr3 9429010 9433844) of SETD5. In some embodiments, the NMD exon is canonical exon 3.

### Protein Expression

[0160] In some embodiments, a mutation occurs in both alleles. In some embodiments, a mutation occurs in one of the two alleles. In some embodiments, additional mutation occurs in one of the two alleles. In some embodiments, the additional mutation occurs in the same allele as the first mutation. In other embodiments, the additional mutation occurs is a trans mutation.

[0161] In some embodiments, the methods described herein are used to increase the production of a functional SETD5 protein or SETD5 RNA. As used herein, the term “functional” refers to the amount of activity or function of a SETD5 protein or SETD5 RNA that is necessary to eliminate any one or more symptoms of a treated condition or disease, e.g., an intellectual disability or an autism spectrum disease. In some embodiments, the disease or condition is selected from the group consisting of: autism; mental retardation; mental retardation, autosomal dominant 23 (mrd23, autosomal dominant non-syndromic intellectual disability 23; autosomal dominant mental retardation 23; intellectual disability-facial dysmorphism syndrome due to setd5 haploinsufficiency; mental retardation, autosomal dominant, type 23); Cornelia De Lange Syndrome (cdls, typus degenerativus amstelodamensis, de lange syndrome, brachmann-de lange syndrome, bdls, brachmann de lange syndrome); alacrima, achalasia, and mental retardation syndrome (aamr, intellectual disability); chromosome 3pter-p25 deletion syndrome (3p-syndrome; 3p deletion syndrome; distal monosomy 3p; chromosome 3p-syndrome; chromosome 3, monosomy 3p25; del syndrome; deletion 3p25; distal 3p deletion; monosomy 3pter; telomeric monosomy 3p; partial monosomy 3p; 3p partial monosomy syndrome; chromo-some 3, deletion 3p; chromosome 3, monosomy 3p; chromosome 3p deletion syndrome; deletion 3p; monosomy 3p; deletion syndrome, chromosome 3pter-p25NK-cell enteropathy); and mental retardation, autosomal dominant 21 (mrd21; autosomal dominant non-syndromic intellectual disability 21; autosomal dominant mental retardation 21; intellectual disability-feeding difficulties-developmental delay-microcephaly syndrome; mental retardation, autosomal dominant, type 21). In some embodiments, the methods are used to increase the production of a partially functional SETD5 protein or SETD5 RNA. As used herein, the term “partially functional” refers to any amount of activity or function of the SETD5 protein or SETD5 RNA that is less than the amount of activity or function that is necessary to eliminate or prevent any one or more symptoms of a disease or condition. In some embodiments, a partially functional protein or RNA will have at least 10%, at least 20%, at least 30%, at least 40%, at least 50%, at least 60%, at least 70%, at least 75%, at least 80%, at least 85%, at least 90%, or at least 95% less activity relative to the fully functional protein or RNA.

[0162] In some embodiments, the method is a method of increasing the expression of the SETD5 protein by cells of a subject having a NIE containing pre-mRNA encoding SETD5 protein, wherein the subject has an intellectual disability or an autism spectrum disease caused by a deficient amount of activity of SETD5 protein, and wherein the deficient amount of the SETD5 protein is caused by haploinsufficiency of the SETD5 protein. In some embodiments, the subject has a disease or condition selected from the group consisting of: autism; mental retardation; mental retardation, autosomal dominant 23 (mrd23, autosomal dominant non-syndromic intellectual disability 23; autosomal dominant mental retardation 23; intellectual disability-facial dysmorphism syndrome due to setd5 haploinsufficiency; mental retardation, autosomal dominant, type 23); Cornelia De Lange Syndrome (cdls, typus degenerativus amstelodamensis, de lange syndrome, brachmann-de lange syndrome, bdls, brachmann de lange syndrome); alacrima, achalasia, and mental retardation syndrome (aamr, intellectual disability); chromosome 3pter-p25 deletion syndrome (3p-syndrome; 3p deletion syndrome; distal monosomy 3p; chromosome 3p-syndrome; chromosome 3, monosomy 3p25; del syndrome; deletion 3p25; distal 3p deletion; monosomy 3pter; telomeric monosomy 3p; partial monosomy 3p; 3p partial monosomy syndrome; chromo-some 3, deletion 3p; chromosome 3, monosomy 3p; chromosome 3p deletion syndrome; deletion 3p; monosomy 3p; deletion syndrome, chromosome 3pter-p25NK-cell enteropathy); and mental retardation, autosomal dominant 21 (mrd21; autosomal dominant non-syndromic intellectual disability 21; autosomal dominant mental retardation 21; intellectual disability-feeding difficulties-developmental delay-microcephaly syndrome; mental retardation, autosomal dominant, type 21). In such an embodiment, the subject has a first allele encoding a functional SETD5 protein, and a second allele from which the SETD5 protein is not produced. In another such embodiment, the subject has a first allele encoding a functional SETD5 protein, and a second allele encoding a nonfunctional SETD5 protein. In another such embodiment, the subject has a first allele encoding a functional SETD5 protein, and a second allele encoding a partially functional SETD5 protein. In any of these embodiments, the antisense oligomer binds to a targeted portion of the NIE containing pre-mRNA transcribed from the second allele, thereby inducing exon skipping of the NMD exon from the pre-mRNA and causing an increase in the level of mature mRNA encoding functional SETD5 protein, and an increase in the expression of the SETD5 protein in the cells of the subject.

[0163] In some embodiments, the method is a method of decreasing the expression of the target protein by cells of a subject having a NSAE pre-mRNA encoding the target protein, wherein the subject has a disease caused by an excess amount of activity of the target protein, wherein the excess amount of the target protein is caused by a mutation, and wherein the target gene is SETD5. In some embodiments, the antisense oligomer binds to a targeted portion of the NSAE pre-mRNA transcribed from the allele carrying a mutation, thereby increasing alternate splicing of NSAEs into the pre-mRNA, and causing an decrease in the level of mature mRNA encoding the functional target protein, and an decrease in the expression of the target protein in the cells of the subject. In related embodiments, the method is a method of using an ASO to decrease the expression of a functional protein or functional RNA. In some embodiments, an ASO is used to decrease the expression of the target protein in cells of a subject having a NSAE pre-mRNA encoding the target protein, wherein the subject has an excess in the amount or function of the target protein.

[0164] In some embodiments, the method is a method of modulating the expression of the target protein by cells of a subject having a NSAE pre-mRNA encoding the target protein, wherein the subject has a disease caused by a deficient or excess amount of activity of the target protein, wherein the deficient or excess amount of the target protein is caused by a mutation, and wherein the target gene is SETD5. In some embodiments, the antisense oligomer binds to a targeted portion of the NSAE pre-mRNA transcribed from the allele carrying a mutation, thereby modulating alternate splicing of NSAEs into the pre-mRNA, and causing a modulation in the level of mature mRNA encoding the functional target protein, and an modulation in the expression of the target protein in the cells of the subject. In related embodiments, the method is a method of using an ASO to modulate the expression of a functional protein or functional RNA. In some embodiments, an ASO is used to modulate the expression of the target protein in cells of a subject having a NSAE pre-mRNA encoding the target protein, wherein the subject has an abnormality in the amount or function of the target protein.

[0165] In some embodiments, the method is a method of increasing the expression of the SETD5 protein by cells of a subject having a NIE containing pre-mRNA encoding the SETD5 protein, wherein the subject has an intellectual disability, or an autism spectrum disease caused by a deficient amount of activity of SETD5 protein, and wherein the deficient amount of the SETD5 protein is caused by autosomal recessive inheritance. In some embodiments, the subject has a disease or condition selected from the group consisting of: autism; mental retardation; mental retardation, autosomal dominant 23 (mrd23, autosomal dominant non-syndromic intellectual disability 23; autosomal dominant mental retardation 23; intellectual disability-facial dysmorphism syndrome due to setd5 haploinsufficiency; mental retardation, autosomal dominant, type 23); Cornelia De Lange Syndrome (cdls, typus degenerativus amstelodamensis, de lange syndrome, brachmann-de lange syndrome, bdls, brachmann de lange syndrome); alacrima, achalasia, and mental retardation syndrome (aamr, intellectual disability); chromosome 3pter-p25 deletion syndrome (3p-syndrome; 3p deletion syndrome; distal monosomy 3p; chromosome 3p-syndrome; chromosome 3, monosomy 3p25; del syndrome; deletion 3p25; distal 3p deletion; monosomy 3pter; telomeric monosomy 3p; partial monosomy 3p; 3p partial monosomy syndrome; chromo-some 3, deletion 3p; chromosome 3, monosomy 3p; chromosome 3p deletion syndrome; deletion 3p; monosomy 3p; deletion syndrome, chromosome 3pter-p25NK-cell enteropathy); and mental retardation, autosomal dominant 21 (mrd21; autosomal dominant non-syndromic intellectual disability 21; autosomal dominant mental retardation 21; intellectual disability-feeding difficulties-developmental delay-microcephaly syndrome; mental retardation, autosomal dominant, type 21).

[0166] In some embodiments, the method is a method of increasing the expression of the SETD5 protein by cells of a subject having a NIE containing pre-mRNA encoding the SETD5 protein, wherein the subject has an intellectual disability, or an autism spectrum disease caused by a deficient amount of activity of SETD5 protein, and wherein the deficient amount of the SETD5 protein is caused by autosomal dominant inheritance. In some embodiments, the subject has a disease or condition selected from the group consisting of: autism; mental retardation; mental retardation, autosomal dominant 23 (mrd23, autosomal dominant non-syndromic intellectual disability 23; autosomal dominant mental retardation 23; intellectual disability-facial dysmorphism syndrome due to setd5 haploinsufficiency; mental retardation, autosomal dominant, type 23); Cornelia De Lange Syndrome (cdls, typus degenerativus amstelodamensis, de lange syndrome, brachmann-de lange syndrome, bdls, brachmann de lange syndrome); alacrima, achalasia, and mental retardation syndrome (aamr, intellectual disability); chromosome 3pter-p25 deletion syndrome (3p-syndrome; 3p deletion syndrome; distal monosomy 3p; chromosome 3p-syndrome; chromosome 3, monosomy 3p25; del syndrome; deletion 3p25; distal 3p deletion; monosomy 3pter; telomeric monosomy 3p; partial monosomy 3p; 3p partial monosomy syndrome; chromo-some 3, deletion 3p; chromosome 3, monosomy 3p; chromosome 3p deletion syndrome; deletion 3p; monosomy 3p; deletion syndrome, chromosome 3pter-p25NK-cell enteropathy); and mental retardation, autosomal dominant 21 (mrd21; autosomal dominant non-syndromic intellectual disability 21; autosomal dominant mental retardation 21; intellectual disability-feeding difficulties-developmental delay-microcephaly syndrome; mental retardation, autosomal dominant, type 21).

[0167] In some embodiments, the method is a method of increasing the expression of the SETD5 protein by cells of a subject having a NIE containing pre-mRNA encoding the SETD5 protein, wherein the subject has an intellectual disability, or an autism spectrum disease caused by a deficient amount of activity of SETD5 protein, and wherein the deficient amount of the SETD5 protein is caused by X-linked dominant inheritance. In some embodiments, the subject has a disease or condition selected from the group consisting of: autism; mental retardation; mental retardation, autosomal dominant 23 (mrd23, autosomal dominant non-syndromic intellectual disability 23; autosomal dominant mental retardation 23; intellectual disability-facial dysmorphism syndrome due to setd5 haploinsufficiency; mental retardation, autosomal dominant, type 23); Cornelia De Lange Syndrome (cdls, typus degenerativus amstelodamensis, de lange syndrome, brachmann-de lange syndrome, bdls, brachmann de lange syndrome); alacrima, achalasia, and mental retardation syndrome (aamr, intellectual disability); chromosome 3pter-p25 deletion syndrome (3p-syndrome; 3p deletion syndrome; distal monosomy 3p; chromosome 3p-syndrome; chromosome 3, monosomy 3p25; del syndrome; deletion 3p25; distal 3p deletion; monosomy 3pter; telomeric monosomy 3p; partial monosomy 3p; 3p partial monosomy syndrome; chromo-some 3, deletion 3p; chromosome 3, monosomy 3p; chromosome 3p deletion syndrome; deletion 3p; monosomy 3p; deletion syndrome, chromosome 3pter-p25NK-cell enteropathy); and mental retardation, autosomal dominant 21 (mrd21; autosomal dominant non-syndromic intellectual disability 21; autosomal dominant mental retardation 21; intellectual disability-feeding difficulties-developmental delay-microcephaly syndrome; mental retardation, autosomal dominant, type 21).

[0168] In related embodiments, the method is a method of using an ASO to increase the expression of a protein or functional RNA. In some embodiments, an ASO may be used to increase the expression of SETD5 protein in cells of a subject having a NIE containing pre-mRNA encoding SETD5 protein, wherein the subject has a deficiency, e.g., an intellectual disability or an autism spectrum disease, in the amount or function of a SETD5 protein. In some embodiments, the subject has a disease or condition selected from the group consisting of: autism; mental retardation; mental retardation, autosomal dominant 23 (mrd23, autosomal dominant non-syndromic intellectual disability 23; autosomal dominant mental retardation 23; intellectual disability-facial dysmorphism syndrome due to setd5 haploinsufficiency; mental retardation, autosomal dominant, type 23); Cornelia De Lange Syndrome (cdls, typus degenerativus amstelodamensis, de lange syndrome, brachmann-de lange syndrome, bdls, brachmann de lange syndrome); alacrima, achalasia, and mental retardation syndrome (aamr, intellectual disability); chromosome 3pter-p25 deletion syndrome (3p-syndrome; 3p deletion syndrome; distal monosomy 3p; chromosome 3p-syndrome; chromosome 3, monosomy 3p25; del syndrome; deletion 3p25; distal 3p deletion; monosomy 3pter; telomeric monosomy 3p; partial monosomy 3p; 3p partial monosomy syndrome; chromo-some 3, deletion 3p; chromosome 3, monosomy 3p; chromosome 3p deletion syndrome; deletion 3p; monosomy 3p; deletion syndrome, chromosome 3pter-p25NK-cell enteropathy); and mental retardation, autosomal dominant 21 (mrd21; autosomal dominant non-syndromic intellectual disability 21; autosomal dominant mental retardation 21; intellectual disability-feeding difficulties-developmental delay-microcephaly syndrome; mental retardation, autosomal dominant, type 21).

[0169] In some embodiments, the NIE containing pre-mRNA transcript that encodes the protein that is causative of the disease or condition is targeted by the ASOs described herein. In some embodiments, a NIE containing pre-mRNA transcript that encodes a protein that is not causative of the disease is targeted by the ASOs. For example, a disease that is the result of a mutation or deficiency of a first protein in a particular pathway may be ameliorated by targeting a NIE containing pre-mRNA that encodes a second protein, thereby increasing production of the second protein. In some embodiments, the function of the second protein is able to compensate for the mutation or deficiency of the first protein (which is causative of the disease or condition).

[0170] In some embodiments, the subject has a disease or condition is associated with a loss-of-function mutation in the target gene or the target protein. In some embodiments, the disease or condition is associated with haploinsufficiency of the target gene. In some embodiments, the subject has a first allele of the target gene encoding a functional protein, and a second allele of the target gene from which the protein is not produced or produced at a reduced level, or a second allele of the target gene encoding a nonfunctional protein or a partially functional protein.

[0171] In some embodiments, the subject has a disease or condition associated with an autosomal recessive mutation of a SETD5 gene. In some embodiments, the subject has a first allele encoding from which: (i) the target protein is not produced or produced at a reduced level compared to a wild-type allele; or (ii) the target protein produced is nonfunctional or partially functional compared to a wild-type allele, and a second allele from which: (iii) the target protein is produced at a reduced level compared to a wild-type allele and the target protein produced is at least partially functional compared to a wild-type allele; or (iv) the target protein produced is partially functional compared to a wild-type allele.

[0172] In some embodiments, the subject has:
[0173] (a) a first mutant allele from which
   [0174] (i) the SETD5 protein is produced at a reduced level compared to production from a wild-type allele,
   [0175] (ii) the SETD5 protein is produced in a form having reduced function compared to an equivalent wild-type protein, or
   [0176] (iii) the SETD5 protein or functional RNA is not produced; and
[0177] (b) a second mutant allele from which
   [0178] (i) the SETD5 protein is produced at a reduced level compared to production from a wild-type allele,
   [0179] (ii) the SETD5 protein is produced in a form having reduced function compared to an equivalent wild-type protein, or
   [0180] (iii) the SETD5 protein is not produced, and
      wherein the NIE containing pre-mRNA is transcribed from the first allele and/or the second allele. In these embodiments, the ASO binds to a targeted portion of the NIE containing pre-mRNA transcribed from the first allele or the second allele, thereby inducing exon skipping of the NMD exon from the NIE containing pre-mRNA and causing an increase in the level of mRNA encoding SETD5 protein and an increase in the expression of the target protein or functional RNA in the cells of the subject. In these embodiments, the target protein or functional RNA having an increase in expression level resulting from the exon skipping of the NMD exon from the NIE containing pre-mRNA may be either in a form having reduced function compared to the equivalent wild-type protein (partially functional), or having full function compared to the equivalent wild-type protein (fully functional).

[0181] In some embodiments, the level of mRNA encoding SETD5 protein is increased 1.1 to 10-fold, when compared to the amount of mRNA encoding SETD5 protein that is produced in a control cell, e.g., one that is not treated with the antisense oligomer or one that is treated with an antisense oligomer that does not bind to the targeted portion of the SETD5 NIE containing pre-mRNA.

[0182] In some embodiments, a subject treated using the methods of the present disclosure expresses a partially functional SETD5 protein from one allele, wherein the partially functional SETD5 protein may be caused by a frameshift mutation, a nonsense mutation, a missense mutation, or a partial gene deletion. In some embodiments, a subject treated using the methods of the disclosure expresses a nonfunctional SETD5 protein from one allele, wherein the nonfunctional SETD5 protein may be caused by a frameshift mutation, a nonsense mutation, a missense mutation, a partial gene deletion, in one allele. In some embodiments, a subject treated using the methods of the disclosure has a SETD5 whole gene deletion, in one allele.

### Exon Inclusion

[0183] As used herein, a “non-sense mediated RNA decay alternative exon” (or “NSAE” or “NMD exon”) is an exon created from alternative splicing events that contains a premature stop codon or leads to the introduction of a premature termination codon or other sequences that triggers degradation of the mRNA containing the of the NMD exon. As used herein, a “NIE containing pre-mRNA” is a pre-mRNA transcript that contains at least one NMD-inducing-exon. Alternative or aberrant splicing can result in inclusion of the at least one NMD exon in the mature mRNA transcripts. The terms “mature mRNA,” and “fully-spliced mRNA,” are used interchangeably herein to describe a fully processed mRNA. Inclusion of the at least one NMD exon can be non-productive mRNA and lead to NMD of the mature mRNA. NIE containing mature mRNA may sometimes lead to aberrant protein expression.

[0184] In some embodiments, the included NMD exon is the most abundant NMD exon in a population of NIE containing pre-mRNAs transcribed from the gene encoding the target protein in a cell. In some embodiments, the included NMD exon is the most abundant NMD exon in a population of NIE containing pre-mRNAs transcribed from the gene encoding the target protein in a cell, wherein the population of NIE containing pre-mRNAs comprises two or more included NMD exons. In some embodiments, an antisense oligomer targeted to the most abundant NMD exon in the population of NIE containing pre-mRNAs encoding the target protein induces exon skipping of one or two or more NMD exons in the population, including the NMD exon to which the antisense oligomer is targeted or binds. In some embodiments, the targeted region is in a NMD exon that is the most abundant NMD exon in a NIE containing pre-mRNA encoding the SETD5 protein.

[0185] The degree of exon inclusion can be expressed as percent exon inclusion, e.g., the percentage of transcripts in which a given NMD exon is included. In brief, percent exon inclusion can be calculated as the percentage of the amount of RNA transcripts with the exon inclusion, over the sum of the average of the amount of RNA transcripts with exon inclusion plus the average of the amount of RNA transcripts with exon exclusion.

[0186] In some embodiments, an included NMD exon is an exon that is identified as an included NMD exon based on a determination of at least about 5%, at least about 10%, at least about 15%, at least about 20%, at least about 25%, at least about 30%, at least about 35%, at least about 40%, at least about 45%, or at least about 50%, inclusion. In embodiments, a included NMD exon is an exon that is identified as a included NMD exon based on a determination of about 5% to about 100%, about 5% to about 95%, about 5% to about 90%, about 5% to about 85%, about 5% to about 80%, about 5% to about 75%, about 5% to about 70%, about 5% to about 65%, about 5% to about 60%, about 5% to about 55%, about 5% to about 50%, about 5% to about 45%, about 5% to about 40%, about 5% to about 35%, about 5% to about 30%, about 5% to about 25%, about 5% to about 20%, about 5% to about 15%, about 10% to about 100%, about 10% to about 95%, about 10% to about 90%, about 10% to about 85%, about 10% to about 80%, about 10% to about 75%, about 10% to about 70%, about 10% to about 65%, about 10% to about 60%, about 10% to about 55%, about 10% to about 50%, about 10% to about 45%, about 10% to about 40%, about 10% to about 35%, about 10% to about 30%, about 10% to about 25%, about 10% to about 20%, about 15% to about 100%, about 15% to about 95%, about 15% to about 90%, about 15% to about 85%, about 15% to about 80%, about 15% to about 75%, about 15% to about 70%, about 15% to about 65%, about 15% to about 60%, about 15% to about 55%, about 15% to about 50%, about 15% to about 45%, about 15% to about 40%, about 15% to about 35%, about 15% to about 30%, about 15% to about 25%, about 20% to about 100%, about 20% to about 95%, about 20% to about 90%, about 20% to about 85%, about 20% to about 80%, about 20% to about 75%, about 20% to about 70%, about 20% to about 65%, about 20% to about 60%, about 20% to about 55%, about 20% to about 50%, about 20% to about 45%, about 20% to about 40%, about 20% to about 35%, about 20% to about 30%, about 25% to about 100%, about 25% to about 95%, about 25% to about 90%, about 25% to about 85%, about 25% to about 80%, about 25% to about 75%, about 25% to about 70%, about 25% to about 65%, about 25% to about 60%, about 25% to about 55%, about 25% to about 50%, about 25% to about 45%, about 25% to about 40%, or about 25% to about 35%, inclusion.

[0187] In some embodiments, contacting cells with an ASO that is complementary to a targeted portion of a SETD5 pre-mRNA transcript results in an increase in the amount of SETD5 protein produced by at least 10, 20, 30, 40, 50, 60, 80, 100, 150, 200, 250, 300, 350, 400, 450, 500, or 1000%, compared to the amount of the protein produced by a cell in the absence of the ASO/absence of treatment. In some embodiments, the total amount of SETD5 protein produced by the cell to which the antisense oligomer is contacted is increased about 20% to about 300%, about 50% to about 300%, about 100% to about 300%, about 150% to about 300%, about 20% to about 50%, about 20% to about 100%, about 20% to about 150%, about 20% to about 200%, about 20% to about 250%, about 50% to about 100%, about 50% to about 150%, about 50% to about 200%, about 50% to about 250%, about 100% to about 150%, about 100% to about 200%, about 100% to about 250%, about 150% to about 200%, about 150% to about 250%, about 200% to about 250%, at least about 10%, at least about 20%, at least about 50%, at least about 100%, at least about 150%, at least about 200%, at least about 250%, or at least about 300%, compared to the amount of target protein produced by a control compound. In some embodiments, the total amount of SETD5 protein produced by the cell to which the antisense oligomer is contacted is increased about 1.1 to about 10-fold, about 1.5 to about 10-fold, about 2 to about 10-fold, about 3 to about 10-fold, about 4 to about 10-fold, about 1.1 to about 5-fold, about 1.1 to about 6-fold, about 1.1 to about 7-fold, about 1.1 to about 8-fold, about 1.1 to about 9-fold, about 2 to about 5-fold, about 2 to about 6-fold, about 2 to about 7-fold, about 2 to about 8-fold, about 2 to about 9-fold, about 3 to about 6-fold, about 3 to about 7-fold, about 3 to about 8-fold, about 3 to about 9-fold, about 4 to about 7-fold, about 4 to about 8-fold, about 4 to about 9-fold, at least about 1.1-fold, at least about 1.5-fold, at least about 2-fold, at least about 2.5-fold, at least about 3-fold, at least about 3.5-fold, at least about 4-fold, at least about 5-fold, or at least about 10-fold, compared to the amount of target protein produced by a control compound. A control compound can be, for example, an oligonucleotide that is not complementary to a targeted portion of the pre-mRNA.

[0188] In some embodiments, contacting cells with an ASO that is complementary to a targeted portion of a SETD5 pre-mRNA transcript results in an increase in the amount of mRNA encoding SETD5, including the mature mRNA encoding the target protein. In some embodiments, the amount of mRNA encoding SETD5 protein, or the mature mRNA encoding the SETD5 protein, is increased by at least 10, 20, 30, 40, 50, 60, 80, 100, 150, 200, 250, 300, 350, 400, 450, 500, or 1000%, compared to the amount of the protein produced by a cell in the absence of the ASO/absence of treatment. In some embodiments, the total amount of the mRNA encoding SETD5 protein, or the mature mRNA encoding SETD5 protein produced in the cell to which the antisense oligomer is contacted is increased about 20% to about 300%, about 50% to about 300%, about 100% to about 300%, about 150% to about 300%, about 20% to about 50%, about 20% to about 100%, about 20% to about 150%, about 20% to about 200%, about 20% to about 250%, about 50% to about 100%, about 50% to about 150%, about 50% to about 200%, about 50% to about 250%, about 100% to about 150%, about 100% to about 200%, about 100% to about 250%, about 150% to about 200%, about 150% to about 250%, about 200% to about 250%, at least about 10%, at least about 20%, at least about 50%, at least about 100%, at least about 150%, at least about 200%, at least about 250%, or at least about 300%, compared to the amount of mature RNA produced in an untreated cell, e.g., an untreated cell or a cell treated with a control compound. In some embodiments, the total amount of the mRNA encoding SETD5 protein, or the mature mRNA encoding SETD5 protein produced in the cell to which the antisense oligomer is contacted is increased about 1.1 to about 10-fold, about 1.5 to about 10-fold, about 2 to about 10-fold, about 3 to about 10-fold, about 4 to about 10-fold, about 1.1 to about 5-fold, about 1.1 to about 6-fold, about 1.1 to about 7-fold, about 1.1 to about 8-fold, about 1.1 to about 9-fold, about 2 to about 5-fold, about 2 to about 6-fold, about 2 to about 7-fold, about 2 to about 8-fold, about 2 to about 9-fold, about 3 to about 6-fold, about 3 to about 7-fold, about 3 to about 8-fold, about 3 to about 9-fold, about 4 to about 7-fold, about 4 to about 8-fold, about 4 to about 9-fold, at least about 1.1-fold, at least about 1.5-fold, at least about 2-fold, at least about 2.5-fold, at least about 3-fold, at least about 3.5-fold, at least about 4-fold, at least about 5-fold, or at least about 10-fold compared to the amount of mature RNA produced in an untreated cell, e.g., an untreated cell or a cell treated with a control compound. A control compound can be, for example, an oligonucleotide that is not complementary to a targeted portion of the SETD5 NIE containing pre-mRNA.

[0189] In some embodiments, contacting cells with an ASO that is complementary to a targeted portion of a SETD5 pre-mRNA transcript results in a decrease in the amount of SETD5 protein produced by at least 10, 20, 30, 40, 50, 60, 80, 100, 150, 200, 250, 300, 350, 400, 450, 500, or 1000%, compared to the amount of the protein produced by a cell in the absence of the ASO/absence of treatment. In some embodiments, the total amount of SETD5 protein produced by the cell to which the antisense oligomer is contacted is decreased about 20% to about 300%, about 50% to about 300%, about 100% to about 300%, about 150% to about 300%, about 20% to about 50%, about 20% to about 100%, about 20% to about 150%, about 20% to about 200%, about 20% to about 250%, about 50% to about 100%, about 50% to about 150%, about 50% to about 200%, about 50% to about 250%, about 100% to about 150%, about 100% to about 200%, about 100% to about 250%, about 150% to about 200%, about 150% to about 250%, about 200% to about 250%, at least about 10%, at least about 20%, at least about 50%, at least about 100%, at least about 150%, at least about 200%, at least about 250%, or at least about 300%, compared to the amount of target protein produced by a control compound. In some embodiments, the total amount of SETD5 protein produced by the cell to which the antisense oligomer is contacted is decreased about 1.1 to about 10-fold, about 1.5 to about 10-fold, about 2 to about 10-fold, about 3 to about 10-fold, about 4 to about 10-fold, about 1.1 to about 5-fold, about 1.1 to about 6-fold, about 1.1 to about 7-fold, about 1.1 to about 8-fold, about 1.1 to about 9-fold, about 2 to about 5-fold, about 2 to about 6-fold, about 2 to about 7-fold, about 2 to about 8-fold, about 2 to about 9-fold, about 3 to about 6-fold, about 3 to about 7-fold, about 3 to about 8-fold, about 3 to about 9-fold, about 4 to about 7-fold, about 4 to about 8-fold, about 4 to about 9-fold, at least about 1.1-fold, at least about 1.5-fold, at least about 2-fold, at least about 2.5-fold, at least about 3-fold, at least about 3.5-fold, at least about 4-fold, at least about 5-fold, or at least about 10-fold, compared to the amount of target protein produced by a control compound. A control compound can be, for example, an oligonucleotide that is not complementary to a targeted portion of the pre-mRNA.

[0190] In some embodiments, the level of mRNA encoding SETD5 protein is decreased 1.1 to 10-fold, when compared to the amount of mRNA encoding SETD5 protein that is produced in a control cell, e.g., one that is not treated with the antisense oligomer or one that is treated with an antisense oligomer that does not bind to the targeted portion of the SETD5 pre-mRNA.

[0191] In some embodiments, the level of mRNA encoding SETD5 protein is decreased 1.1 to 10-fold, when compared to the amount of mRNA encoding SETD5 protein that is produced in a control cell, e.g., one that is not treated with the antisense oligomer or one that is treated with an antisense oligomer that does not bind to the targeted portion of the SETD5 pre-mRNA.

[0192] In some embodiments of the present invention, a subject can have a mutation in SETD5. A variety of pathogenic variants have been reported to cause SETD5 deficiency, including missense variants, nonsense variants, single- and double-nucleotide insertions and deletions, complex insertion/deletions, and splice site variants. In the presence of this pathogenic variant approximately 2%-5% of transcripts are correctly spliced, allowing for residual enzyme activity. In some embodiments, disease results from loss of function of SETD5 caused by SETD5 pathogenic variants that generate truncated proteins or proteins with altered conformations or reduced activity.

[0193] The NIE can be in any length. In some embodiments, the NIE comprises a full sequence of an intron, in which case, it can be referred to as intron retention. In some embodiments, the NIE can be a portion of the intron. In some embodiments, the NIE can be a 5′ end portion of an intron including a 5′ss sequence. In some embodiments, the NIE can be a 3′ end portion of an intron including a 3′ss sequence.

[0194] In some embodiments, the NIE can be a portion within an intron without inclusion of a 5′ss sequence. In some embodiments, the NIE can be a portion within an intron without inclusion of a 3′ss sequence. In some embodiments, the NIE can be a portion within an intron without inclusion of either a 5′ss or a 3′ss sequence. In some embodiments, the NIE can be from 5 nucleotides to 10 nucleotides in length, from 10 nucleotides to 15 nucleotides in length, from 15 nucleotides to 20 nucleotides in length, from 20 nucleotides to 25 nucleotides in length, from 25 nucleotides to 30 nucleotides in length, from 30 nucleotides to 35 nucleotides in length, from 35 nucleotides to 40 nucleotides in length, from 40 nucleotides to 45 nucleotides in length, from 45 nucleotides to 50 nucleotides in length, from 50 nucleotides to 55 nucleotides in length, from 55 nucleotides to 60 nucleotides in length, from 60 nucleotides to 65 nucleotides in length, from 65 nucleotides to 70 nucleotides in length, from 70 nucleotides to 75 nucleotides in length, from 75 nucleotides to 80 nucleotides in length, from 80 nucleotides to 85 nucleotides in length, from 85 nucleotides to 90 nucleotides in length, from 90 nucleotides to 95 nucleotides in length, or from 95 nucleotides to 100 nucleotides in length. In some embodiments, the NIE can be at least 10 nucleotides, at least 20 nucleotides, at least 30 nucleotides, at least 40 nucleotides, at least 50 nucleotides, at least 60 nucleoids, at least 70 nucleotides, at least 80 nucleotides in length, at least 90 nucleotides, or at least 100 nucleotides in length. In some embodiments, the NIE can be from 100 to 200 nucleotides in length, from 200 to 300 nucleotides in length, from 300 to 400 nucleotides in length, from 400 to 500 nucleotides in length, from 500 to 600 nucleotides in length, from 600 to 700 nucleotides in length, from 700 to 800 nucleotides in length, from 800 to 900 nucleotides in length, from 900 to 1,000 nucleotides in length. In some embodiments, the NIE may be longer than 1,000 nucleotides in length.

[0195] In some embodiments, the pre-mRNA comprises two or more NMD exons. In some embodiments, the pre-mRNA comprises three or more NMD exons. In some embodiments, the pre-mRNA comprises two or more different NMD exons. In some embodiments, the pre-mRNA comprises three or more different NMD exons. In some embodiments, splicing of one or more NMD exons from the pre-mRNA are modulated. In some embodiments, splicing of two or more NMD exons from the pre-mRNA are modulated. In some embodiments, splicing of three or more NMD exons from the pre-mRNA are modulated.

[0196] In some embodiments, splicing of one or more NMD exons from the pre-mRNA are increased. In some embodiments, splicing of two or more NMD exons from the pre-mRNA are increased. In some embodiments, splicing of three or more NMD exons from the pre-mRNA are increased. In some embodiments, splicing of one or more NMD exons from the pre-mRNA are decreased. In some embodiments, splicing of two or more NMD exons from the pre-mRNA are decreased. In some embodiments, splicing of three or more NMD exons from the pre-mRNA are decreased.

[0197] In some embodiments, splicing of one NMD exon from the pre-mRNA are decreased and other NMD exons from the pre-mRNA are increased. In some embodiments, splicing of one NMD exon from the pre-mRNA are increased and other NMD exons from the pre-mRNA are decreased. In some embodiments, splicing of two NMD exons from the pre-mRNA are decreased and other NMD exons from the pre-mRNA are increased. In some embodiments, splicing of two NMD exons from the pre-mRNA are increased and other NMD exons from the pre-mRNA are decreased. In some embodiments, splicing of three NMD exons from the pre-mRNA are decreased and other NMD exons from the pre-mRNA are increased. In some embodiments, splicing of three NMD exons from the pre-mRNA are increased and other NMD exons from the pre-mRNA are decreased. In some embodiments, splicing of four NMD exons from the pre-mRNA are decreased and other NMD exons from the pre-mRNA are increased. In some embodiments, splicing of four NMD exons from the pre-mRNA are increased and other NMD exons from the pre-mRNA are decreased. In some embodiments, splicing of five NMD exons from the pre-mRNA are decreased and other NMD exons from the pre-mRNA are increased. In some embodiments, splicing of five NMD exons from the pre-mRNA are increased and other NMD exons from the pre-mRNA are decreased. In some embodiments, splicing of some NMD exons from the pre-mRNA are decreased and other NMD exons from the pre-mRNA are increased. In some embodiments, splicing of some NMD exons from the pre-mRNA are increased and other NMD exons from the pre-mRNA are decreased.

[0198] In some embodiments, the two or more NMD exons are located in a single intron. In some embodiments, the two or more NMD exons are located in different introns. In some embodiments, the three or more NMD exons are located in a single intron. In some embodiments, the three or more NMD exons are located in different introns.

[0199] Inclusion of an NMD exon can lead to a frameshift and the introduction of a premature termination codon (PIC) in the mature mRNA transcript rendering the transcript a target of NMD. Mature mRNA transcript containing NIE can be non-productive mRNA transcript which does not lead to protein expression. The PIC can be present in any position downstream of an NIE. In some embodiments, the PIC can be present in any exon downstream of an NIE. In some embodiments, the PIC can be present within the NIE. For example, inclusion of Exon 5X, exon 3X, or exon 3Y of SETD5 pre-mRNA in an mRNA transcript encoded by the SETD5 gene can induce a PIC in the mRNA transcript. For example, inclusion of exon (GRCh38/hg38: chr3 9429827 9430051), exon (GRCh38/hg38: chr3 9433370 9433562), exon (GRCh38/hg38: chr3 9434591 9434630) or exon (GRCh38/hg38: chr3 9428823 9429009) of SETD5 in an mRNA transcript encoded by SETD5.

### Therapeutic Agents

[0200] In some embodiments, the agents as used herein refers to the therapeutic agents. In some embodiments, the therapeutic agents as used herein refers to the agents.

[0201] In various embodiments of the present disclosure, compositions and methods comprising a therapeutic agent are provided to modulate protein expression level of SETD5. In some embodiments, provided herein are compositions and methods to modulate alternative splicing of SETD5 pre-mRNA. In some embodiments, provided herein are compositions and methods to induce exon skipping in the splicing of SETD5 pre-mRNA, e.g., to induce skipping of a NMD exon during splicing of SETD5 pre-mRNA. In other embodiments, therapeutic agents may be used to induce the inclusion of an exon in order to decrease the protein expression level.

[0202] A therapeutic agent disclosed herein can be a NIE repressor agent. A therapeutic agent may comprise a polynucleic acid polymer. A therapeutic agent disclosed herein can be an alternative splicing repressor agent. In some embodiments, a therapeutic agent may comprise a polynucleic acid polymer. In other embodiments, a therapeutic agent may comprise a small molecule. In other embodiments, a therapeutic agent may comprise a polypeptide. In some embodiments, the therapeutic agent is a nucleic acid binding protein, with or without being complexed with a nucleic acid molecule. In other embodiments, the therapeutic agent is a nucleic acid molecule that encodes for another therapeutic agent. In further embodiments, the therapeutic agent is incorporated into a viral delivery system, such as an adenovirus-associated vector.

[0203] According to one aspect of the present disclosure, provided herein is a method of treatment or prevention of a condition or disease associated with a functional SETD5 protein deficiency, comprising administering a NIE repressor agent to a subject to increase levels of functional SETD5 protein, wherein the agent binds to a region of the pre-mRNA transcript to decrease inclusion of the NIE in the mature transcript. For example, provided herein is a method of treatment or prevention of a condition associated with a functional SETD5 protein deficiency, comprising administering a NIE repressor agent to a subject to increase levels of functional SETD5 protein, wherein the agent binds to a region of an intron containing an NIE (e.g., Exon 5X, exon 3Y, or exon 3X of SETD5) of the pre-mRNA transcript or to a NIE-activating regulatory sequence in the same intron. For example, provided herein is a method of treatment or prevention of a condition associated with a functional SETD5 protein deficiency, comprising administering a NIE repressor agent to a subject to increase levels of functional SETD5 protein, wherein the agent binds to a region of an intron containing an NIE (e.g., exon (GRCh38/hg38: chr3 9429827 9430051), exon (GRCh38/hg38: chr3 9433370 9433562), exon (GRCh38/hg38: chr3 9434591 9434630) or exon (GRCh38/hg38: chr3 9428823 9429009) of SETD5) of the pre-mRNA transcript or to a NIE-activating regulatory sequence in the same intron.

[0204] According to one aspect of the present disclosure, provided herein is a method of treatment or prevention of a condition associated with a functional-SETD5 protein deficiency, comprising administering an alternative splicing repressor agent to a subject to increase levels of functional SETD5 protein, wherein the agent binds to a region of the pre-mRNA transcript to decrease inclusion of the NSAE in the mature transcript.

[0205] Alternatively, for example, provided herein is a method of treatment or prevention of a condition associated with a functional target protein overexpression, comprising administering an alternative splicing repressor agent to a subject to decrease levels of functional target protein, wherein the agent binds to a region of an exon or an intron of the pre-mRNA transcript, wherein the target gene is SETD5.

[0206] Where reference is made to reducing NIE inclusion in the mature mRNA, the reduction may be complete, e.g., 100%, or may be partial. The reduction may be clinically significant. The reduction/correction may be relative to the level of NIE inclusion in the subject without treatment, or relative to the amount of NIE inclusion in a population of similar subjects. The reduction/correction may be at least 10% less NIE inclusion relative to the average subject, or the subject prior to treatment. The reduction may be at least 20% less NIE inclusion relative to an average subject, or the subject prior to treatment. The reduction may be at least 40% less NIE inclusion relative to an average subject, or the subject prior to treatment. The reduction may be at least 50% less NIE inclusion relative to an average subject, or the subject prior to treatment. The reduction may be at least 60% less NIE inclusion relative to an average subject, or the subject prior to treatment. The reduction may be at least 80% less NIE inclusion relative to an average subject, or the subject prior to treatment. The reduction may be at least 90% less NIE inclusion relative to an average subject, or the subject prior to treatment.

[0207] Where reference is made to increasing active SETD5 protein levels, the increase may be clinically significant. The increase may be relative to the level of active SETD5 protein in the subject without treatment, or relative to the amount of active SETD5 protein in a population of similar subjects. The increase may be at least 10% more active SETD5 protein relative to the average subject, or the subject prior to treatment. The increase may be at least 20% more active SETD5 protein relative to the average subject, or the subject prior to treatment. The increase may be at least 40% more active SETD5 protein relative to the average subject, or the subject prior to treatment. The increase may be at least 50% more active SETD5 protein relative to the average subject, or the subject prior to treatment. The increase may be at least 80% more active SETD5 protein relative to the average subject, or the subject prior to treatment. The increase may be at least 100% more active SETD5 protein relative to the average subject, or the subject prior to treatment. The increase may be at least 200% more active SETD5 protein relative to the average subject, or the subject prior to treatment. The increase may be at least 500% more active SETD5 protein relative to the average subject, or the subject prior to treatment.

[0208] Where reference is made to decreasing functional-SETD5 protein levels, the decrease may be clinically significant. The decrease may be relative to the level of functional-SETD5 protein in the subject without treatment, or relative to the amount of functional-SETD5 protein in a population of similar subjects. The decrease may be at least 10% less functional-SETD5 protein relative to the average subject, or the subject prior to treatment. The decrease may be at least 20% less functional-SETD5 protein relative to the average subject, or the subject prior to treatment. The decrease may be at least 40% less functional-SETD5 protein relative to the average subject, or the subject prior to treatment. The decrease may be at least 50% less functional-SETD5 protein relative to the average subject, or the subject prior to treatment. The decrease may be at least 80% less functional-SETD5 protein relative to the average subject, or the subject prior to treatment. The decrease may be at least 100% less functional-SETD5 protein relative to the average subject, or the subject prior to treatment.

[0209] In embodiments wherein the NIE repressor agent comprises a polynucleic acid polymer, the polynucleic acid polymer may be about 50 nucleotides in length. The polynucleic acid polymer may be about 45 nucleotides in length. The polynucleic acid polymer may be about 40 nucleotides in length. The polynucleic acid polymer may be about 35 nucleotides in length. The polynucleic acid polymer may be about 30 nucleotides in length. The polynucleic acid polymer may be about 24 nucleotides in length. The polynucleic acid polymer may be about 25 nucleotides in length. The polynucleic acid polymer may be about 20 nucleotides in length. The polynucleic acid polymer may be about 19 nucleotides in length. The polynucleic acid polymer may be about 18 nucleotides in length. The polynucleic acid polymer may be about 17 nucleotides in length. The polynucleic acid polymer may be about 16 nucleotides in length. The polynucleic acid polymer may be about 15 nucleotides in length. The polynucleic acid polymer may be about 14 nucleotides in length. The polynucleic acid polymer may be about 13 nucleotides in length. The polynucleic acid polymer may be about 12 nucleotides in length. The polynucleic acid polymer may be about 11 nucleotides in length. The polynucleic acid polymer may be about 10 nucleotides in length. The polynucleic acid polymer may be between about 10 and about 50 nucleotides in length. The polynucleic acid polymer may be between about 10 and about 45 nucleotides in length. The polynucleic acid polymer may be between about 10 and about 40 nucleotides in length. The polynucleic acid polymer may be between about 10 and about 35 nucleotides in length. The polynucleic acid polymer may be between about 10 and about 30 nucleotides in length. The polynucleic acid polymer may be between about 10 and about 25 nucleotides in length. The polynucleic acid polymer may be between about 10 and about 20 nucleotides in length. The polynucleic acid polymer may be between about 15 and about 25 nucleotides in length. The polynucleic acid polymer may be between about 15 and about 30 nucleotides in length. The polynucleic acid polymer may be between about 12 and about 30 nucleotides in length.

[0210] In embodiments wherein the alternative splicing repressor agent comprises a polynucleic acid polymer, the polynucleic acid polymer may be about 50 nucleotides in length. In embodiments wherein the alternative splicing modulator agent comprises a polynucleic acid polymer, the polynucleic acid polymer may be about 50 nucleotides in length. The polynucleic acid polymer may be about 45 nucleotides in length. The polynucleic acid polymer may be about 40 nucleotides in length. The polynucleic acid polymer may be about 35 nucleotides in length. The polynucleic acid polymer may be about 30 nucleotides in length. The polynucleic acid polymer may be about 24 nucleotides in length. The polynucleic acid polymer may be about 25 nucleotides in length. The polynucleic acid polymer may be about 20 nucleotides in length. The polynucleic acid polymer may be about 19 nucleotides in length. The polynucleic acid polymer may be about 18 nucleotides in length. The polynucleic acid polymer may be about 17 nucleotides in length. The polynucleic acid polymer may be about 16 nucleotides in length. The polynucleic acid polymer may be about 15 nucleotides in length. The polynucleic acid polymer may be about 14 nucleotides in length. The polynucleic acid polymer may be about 13 nucleotides in length. The polynucleic acid polymer may be about 12 nucleotides in length. The polynucleic acid polymer may be about 11 nucleotides in length. The polynucleic acid polymer may be about 10 nucleotides in length. The polynucleic acid polymer may be between about 10 and about 50 nucleotides in length. The polynucleic acid polymer may be between about 10 and about 45 nucleotides in length. The polynucleic acid polymer may be between about 10 and about 40 nucleotides in length. The polynucleic acid polymer may be between about 10 and about 35 nucleotides in length. The polynucleic acid polymer may be between about 10 and about 30 nucleotides in length. The polynucleic acid polymer may be between about 10 and about 25 nucleotides in length. The polynucleic acid polymer may be between about 10 and about 20 nucleotides in length. The polynucleic acid polymer may be between about 15 and about 25 nucleotides in length. The polynucleic acid polymer may be between about 15 and about 30 nucleotides in length. The polynucleic acid polymer may be between about 12 and about 30 nucleotides in length.

[0211] The sequence of the polynucleic acid polymer may be at least 50%, 55%, 60%, 65%, 70%, 75%, 80%, 85%, 90%, 91%, 92%, 93%, 94%, 95%, 96%, 97%, 98%, 99%, or 99.5% complementary to a target sequence of an mRNA transcript, e.g., a partially processed mRNA transcript. The sequence of the polynucleic acid polymer may be 100% complementary to a target sequence of a pre-mRNA transcript.

[0212] The sequence of the polynucleic acid polymer may have 4 or fewer mismatches to a target sequence of the pre-mRNA transcript. The sequence of the polynucleic acid polymer may have 3 or fewer mismatches to a target sequence of the pre-mRNA transcript. The sequence of the polynucleic acid polymer may have 2 or fewer mismatches to a target sequence of the pre-mRNA transcript. The sequence of the polynucleic acid polymer may have 1 or fewer mismatches to a target sequence of the pre-mRNA transcript. The sequence of the polynucleic acid polymer may have no mismatches to a target sequence of the pre-mRNA transcript.

[0213] The polynucleic acid polymer may specifically hybridize to a target sequence of the pre-mRNA transcript. For example, the polynucleic acid polymer may have 91%, 92%, 93%, 94%, 95%, 96%, 97%, 98%, 99%, 99.5% or 100% sequence complementarity to a target sequence of the pre-mRNA transcript. The hybridization may be under high stringent hybridization conditions.

[0214] The polynucleic acid polymer comprises a sequence with at least 50%, 55%, 60%, 65%, 70%, 75%, 80%, 85%, 90%, 91%, 92%, 93%, 94%, 95%, 96%, 97%, 98%, 99%, or 99.5% sequence identity to a sequence selected from the group consisting of the sequences listed in Table 4 (e.g., the sequence set forth in any one of SEQ ID NO: 1-331). The polynucleic acid polymer may comprise a sequence with 100% sequence identity to a sequence selected from the group consisting of the sequences listed in Table 4 (e.g., the sequence set forth in any one of SEQ ID NO: 1-331). The polynucleic acid polymer is a sequence with at least 50%, 55%, 60%, 65%, 70%, 75%, 80%, 85%, 90%, 91%, 92%, 93%, 94%, 95%, 96%, 97%, 98%, 99%, or 99.5% sequence identity to a sequence selected from the group consisting of the sequences listed in Table 4 (e.g., the sequence set forth in any one of SEQ ID NO: 1-331). The polynucleic acid polymer is a sequence with 100% sequence identity to a sequence selected from the group consisting of the sequences listed in Table 4 (e.g., the sequence set forth in any one of SEQ ID NO: 1-331).

[0215] Where reference is made to a polynucleic acid polymer sequence, the skilled person will understand that one or more substitutions may be tolerated, optionally two substitutions may be tolerated in the sequence, such that it maintains the ability to hybridize to the target sequence; or where the substitution is in a target sequence, the ability to be recognized as the target sequence. References to sequence identity may be determined by BLAST sequence alignment using standard/default parameters. For example, the sequence may have 99% identity and still function according to the present disclosure. In other embodiments, the sequence may have 98% identity and still function according to the present disclosure. In another embodiment, the sequence may have 95% identity and still function according to the present disclosure. In another embodiment, the sequence may have 90% identity and still function according to the present disclosure.

### Antisense Oligomers

[0216] Provided herein is a composition comprising an antisense oligomer that induces exon skipping by binding to a targeted portion of a SETD5 NIE containing pre-mRNA. As used herein, the terms “ASO” and “antisense oligomer” are used interchangeably and refer to an oligomer such as a polynucleotide, comprising nucleobases that hybridizes to a target nucleic acid (e.g., a SETD5 NIE containing pre-mRNA) sequence by Watson-Crick base pairing or wobble base pairing (G-U). The ASO may have exact sequence complementary to the target sequence or near complementarity (e.g., sufficient complementarity to bind the target sequence and enhancing splicing at a splice site). ASOs are designed so that they bind (hybridize) to a target nucleic acid (e.g., a targeted portion of a pre-mRNA transcript) and remain hybridized under physiological conditions. Typically, if they hybridize to a site other than the intended (targeted) nucleic acid sequence, they hybridize to a limited number of sequences that are not a target nucleic acid (to a few sites other than a target nucleic acid). Design of an ASO can take into consideration the occurrence of the nucleic acid sequence of the targeted portion of the pre-mRNA transcript or a sufficiently similar nucleic acid sequence in other locations in the genome or cellular pre-mRNA or transcriptome, such that the likelihood the ASO will bind other sites and cause “off-target” effects is limited. Any antisense oligomers known in the art, for example, in PCT Application No. PCT/US2014/054151, published as WO 2015/035091, titled “Reducing Nonsense-Mediated mRNA Decay,” incorporated by reference herein, can be used to practice the methods described herein.

[0217] In some embodiments, ASOs “specifically hybridize” to or are “specific” to a target nucleic acid or a targeted portion of a NIE containing pre-mRNA. Typically, such hybridization occurs with a Tₘ substantially greater than 37° C., preferably at least 50° C., and typically between 60° C. to approximately 90° C. Such hybridization preferably corresponds to stringent hybridization conditions. At a given ionic strength and pH, the Tₘ is the temperature at which 50% of a target sequence hybridizes to a complementary oligonucleotide.

[0218] Oligomers, such as oligonucleotides, are “complementary” to one another when hybridization occurs in an antiparallel configuration between two single-stranded polynucleotides. A double-stranded polynucleotide can be “complementary” to another polynucleotide, if hybridization can occur between one of the strands of the first polynucleotide and the second. Complementarity (the degree to which one polynucleotide is complementary with another) is quantifiable in terms of the proportion (e.g., the percentage) of bases in opposing strands that are expected to form hydrogen bonds with each other, according to generally accepted base-pairing rules. The sequence of an antisense oligomer (ASO) need not be 100% complementary to that of its target nucleic acid to hybridize. In certain embodiments, ASOs can comprise at least 70%, at least 75%, at least 80%, at least 85%, at least 90%, at least 95%, at least 96%, at least 97%, at least 98%, or at least 99% sequence complementarity to a target region within the target nucleic acid sequence to which they are targeted. For example, an ASO in which 18 of 20 nucleobases of the oligomeric compound are complementary to a target region, and would therefore specifically hybridize, would represent 90 percent complementarity. In this example, the remaining non-complementary nucleobases may be clustered together or interspersed with complementary nucleobases and need not be contiguous to each other or to complementary nucleobases. Percent complementarity of an ASO with a region of a target nucleic acid can be determined routinely using BLAST programs (basic local alignment search tools) and PowerBLAST programs known in the art (Altschul, et al., J. Mol. Biol., 1990, 215, 403-410; Zhang and Madden, Genome Res., 1997, 7, 649-656).

[0219] An ASO need not hybridize to all nucleobases in a target sequence and the nucleobases to which it does hybridize may be contiguous or noncontiguous. ASOs may hybridize over one or more segments of a pre-mRNA transcript, such that intervening or adjacent segments are not involved in the hybridization event (e.g., a loop structure or hairpin structure may be formed). In certain embodiments, an ASO hybridizes to noncontiguous nucleobases in a target pre-mRNA transcript. For example, an ASO can hybridize to nucleobases in a pre-mRNA transcript that are separated by one or more nucleobase(s) to which the ASO does not hybridize.

[0220] The ASOs described herein comprise nucleobases that are complementary to nucleobases present in a target portion of a NIE containing pre-mRNA. The term ASO embodies oligonucleotides and any other oligomeric molecule that comprises nucleobases capable of hybridizing to a complementary nucleobase on a target mRNA but does not comprise a sugar moiety, such as a peptide nucleic acid (PNA). The ASOs may comprise naturally occurring nucleotides, nucleotide analogs, modified nucleotides, or any combination of two or three of the preceding. The term “naturally occurring nucleotides” includes deoxyribonucleotides and ribonucleotides. The term “modified nucleotides” includes nucleotides with modified or substituted sugar groups and/or having a modified backbone. In some embodiments, all of the nucleotides of the ASO are modified nucleotides. Chemical modifications of ASOs or components of ASOs that are compatible with the methods and compositions described herein will be evident to one of skill in the art and can be found, for example, in U.S. Pat. No. 8,258,109 B2, U.S. Pat. No. 5,656,612, U.S. Patent Publication No. 2012/0190728, and Dias and Stein, Mol. Cancer Ther. 2002, 347-355, herein incorporated by reference in their entirety.

[0221] One or more nucleobases of an ASO may be any naturally occurring, unmodified nucleobase such as adenine, guanine, cytosine, thymine and uracil, or any synthetic or modified nucleobase that is sufficiently similar to an unmodified nucleobase such that it is capable of hydrogen bonding with a nucleobase present on a target pre-mRNA. Examples of modified nucleobases include, without limitation, hypoxanthine, xanthine, 7-methylguanine, 5,6-dihydrouracil, 5-methylcytosine, and 5-hydroxymethoylcytosine.

[0222] The ASOs described herein also comprise a backbone structure that connects the components of an oligomer. The term “backbone structure” and “oligomer linkages” may be used interchangeably and refer to the connection between monomers of the ASO. In naturally occurring oligonucleotides, the backbone comprises a 3′-5′ phosphodiester linkage connecting sugar moieties of the oligomer. The backbone structure or oligomer linkages of the ASOs described herein may include (but are not limited to) phosphorothioate, phosphorodithioate, phosphoroselenoate, phosphorodiselenoate, phosphoroanilothioate, phosphoraniladate, phosphoramidate, and the like. See, e.g., LaPlanche, et al., Nucleic Acids Res. 14:9081 (1986); Stec, et al., J. Am. Chem. Soc. 106:6077 (1984), Stein, et al., Nucleic Acids Res. 16:3209 (1988), Zon, et al., Anti-Cancer Drug Design 6:539 (1991); Zon, et al., Oligonucleotides and Analogues: A Practical Approach, pp. 87-108 (F. Eckstein, Ed., Oxford University Press, Oxford England (1991)); Stec, et al., U.S. Pat. No. 5,151,510; Uhlmann and Peyman, Chemical Reviews 90:543 (1990). In some embodiments, the backbone structure of the ASO does not contain phosphorous but rather contains peptide bonds, for example, in a peptide nucleic acid (PNA), or linking groups including carbamate, amides, and linear and cyclic hydrocarbon groups. In some embodiments, the backbone modification is a phosphothioate linkage. In some embodiments, the backbone modification is a phosphoramidate linkage.

[0223] In some embodiments, the stereochemistry at each of the phosphorus internucleotide linkages of the ASO backbone is random. In some embodiments, the stereochemistry at each of the phosphorus internucleotide linkages of the ASO backbone is controlled and is not random. For example, U.S. Pat. App. Pub. No. 2014/0194610, “Methods for the Synthesis of Functionalized Nucleic Acids,” incorporated herein by reference, describes methods for independently selecting the handedness of chirality at each phosphorous atom in a nucleic acid oligomer. In some embodiments, an ASO used in the methods of the disclosure, including, but not limited to, any of the ASOs set forth herein in Table 4 (e.g., the sequence set forth in any one of SEQ ID NO: 1-331), comprises an ASO having phosphorus internucleotide linkages that are not random. In some embodiments, a composition used in the methods of the disclosure comprises a pure diastereomeric ASO. In some embodiments, a composition used in the methods of the disclosure comprises an ASO that has diastereomeric purity of at least about 90%, at least about 91%, at least about 92%, at least about 93%, at least about 94%, at least about 95%, at least about 96%, at least about 97%, at least about 98%, at least about 99%, about 100%, about 90% to about 100%, about 91% to about 100%, about 92% to about 100%, about 93% to about 100%, about 94% to about 100%, about 95% to about 100%, about 96% to about 100%, about 97% to about 100%, about 98% to about 100%, or about 99% to about 100%.

[0224] In some embodiments, the ASO has a nonrandom mixture of Rp and Sp configurations at its phosphorus internucleotide linkages. For example, it has been suggested that a mix of Rp and Sp is required in antisense oligonucleotides to achieve a balance between good activity and nuclease stability (Wan, et al., 2014, “Synthesis, biophysical properties and biological activity of second-generation antisense oligonucleotides containing chiral phosphorothioate linkages,” Nucleic Acids Research 42(22): 13456-13468, incorporated herein by reference). In some embodiments, an ASO used in the methods of the disclosure, including, but not limited to, any of the ASOs set forth herein in SEQ ID NOs: 1-331, comprises about 5-100% Rp, at least about 5% Rp, at least about 10% Rp, at least about 15% Rp, at least about 20% Rp, at least about 25% Rp, at least about 30% Rp, at least about 35% Rp, at least about 40% Rp, at least about 45% Rp, at least about 50% Rp, at least about 55% Rp, at least about 60% Rp, at least about 65% Rp, at least about 70% Rp, at least about 75% Rp, at least about 80% Rp, at least about 85% Rp, at least about 90% Rp, or at least about 95% Rp, with the remainder Sp, or about 100% Rp. In some embodiments, an ASO used in the methods of the disclosure, including, but not limited to, any of the ASOs set forth herein comprise a sequence with at least about 80%, 85%, 90%, 95%, 97%, or 100% sequence identity to a region comprising at least 8 contiguous nucleic acids of any one of SEQ ID NOs: 1-331, comprises about 10% to about 100% Rp, about 15% to about 100% Rp, about 20% to about 100% Rp, about 25% to about 100% Rp, about 30% to about 100% Rp, about 35% to about 100% Rp, about 40% to about 100% Rp, about 45% to about 100% Rp, about 50% to about 100% Rp, about 55% to about 100% Rp, about 60% to about 100% Rp, about 65% to about 100% Rp, about 70% to about 100% Rp, about 75% to about 100% Rp, about 80% to about 100% Rp, about 85% to about 100% Rp, about 90% to about 100% Rp, or about 95% to about 100% Rp, about 20% to about 80% Rp, about 25% to about 75% Rp, about 30% to about 70% Rp, about 40% to about 60% Rp, or about 45% to about 55% Rp, with the remainder Sp.

[0225] In some embodiments, an ASO used in the methods of the disclosure, including, but not limited to, any of the ASOs set forth herein comprise a sequence with at least about 80%, 85%, 90%, 95%, 97%, or 100% sequence identity to a region comprising at least 8 contiguous nucleic acids of any one of SEQ ID NOs: 1-331, comprises about 5-100% Sp, at least about 5% Sp, at least about 10% Sp, at least about 15% Sp, at least about 20% Sp, at least about 25% Sp, at least about 30% Sp, at least about 35% Sp, at least about 40% Sp, at least about 45% Sp, at least about 50% Sp, at least about 55% Sp, at least about 60% Sp, at least about 65% Sp, at least about 70% Sp, at least about 75% Sp, at least about 80% Sp, at least about 85% Sp, at least about 90% Sp, or at least about 95% Sp, with the remainder Rp, or about 100% Sp. In embodiments, an ASO used in the methods of the disclosure, including, but not limited to, any of the ASOs set forth herein comprise a sequence with at least about 80%, 85%, 90%, 95%, 97%, or 100% sequence identity to a region comprising at least 8 contiguous nucleic acids of any one of SEQ ID NOs: 1-331, comprises about 10% to about 100% Sp, about 15% to about 100% Sp, about 20% to about 100% Sp, about 25% to about 100% Sp, about 30% to about 100% Sp, about 35% to about 100% Sp, about 40% to about 100% Sp, about 45% to about 100% Sp, about 50% to about 100% Sp, about 55% to about 100% Sp, about 60% to about 100% Sp, about 65% to about 100% Sp, about 70% to about 100% Sp, about 75% to about 100% Sp, about 80% to about 100% Sp, about 85% to about 100% Sp, about 90% to about 100% Sp, or about 95% to about 100% Sp, about 20% to about 80% Sp, about 25% to about 75% Sp, about 30% to about 70% Sp, about 40% to about 60% Sp, or about 45% to about 55% Sp, with the remainder Rp.

[0226] Any of the ASOs described herein may contain a sugar moiety that comprises ribose or deoxyribose, as present in naturally occurring nucleotides, or a modified sugar moiety or sugar analog, including a morpholine ring. Non-limiting examples of modified sugar moieties include 2′ substitutions such as 2′-O-methyl (2′-O-Me), 2′-O-methoxyethyl (2′MOE), 2′-O-aminoethyl, 2′-F, 2′-NMA; N3′->P5′ phosphoramidate, 2′dimethylaminooxyethoxy, 2′dimethylaminoethoxyethoxy, 2′-guanidinidium, 2′-O-guanidinium ethyl, carbamate modified sugars, and bicyclic modified sugars. In some embodiments, the sugar moiety modification is selected from 2′-O-Me, 2′-F, 2′-MOE, and 2′-NMA. In some embodiments, the sugar moiety modification is an extra bridge bond, such as in a locked nucleic acid (LNA). In some embodiments the sugar analog contains a morpholine ring, such as phosphorodiamidate morpholino (PMO). In some embodiments, the sugar moiety comprises a ribofuransyl or 2′deoxyribofuransyl modification. In some embodiments, the sugar moiety comprises 2′4′-constrained 2′O-methyloxyethyl (cMOE) modifications. In some embodiments, the sugar moiety comprises cEt 2′, 4′ constrained 2′-O ethyl BNA modifications. In some embodiments, the sugar moiety comprises tricycloDNA (tcDNA) modifications. In some embodiments, the sugar moiety comprises ethylene nucleic acid (ENA) modifications. In some embodiments, the sugar moiety comprises MCE modifications. Modifications are known in the art and described in the literature, e.g., by Jarver, et al., 2014, “A Chemical View of Oligonucleotides for Exon Skipping and Related Drug Applications,” Nucleic Acid Therapeutics 24(1): 37-47, incorporated by reference for this purpose herein.

[0227] As used herein, “2′-NMA” can mean a —O—CH2-C(═O)—NH—CH3 group in place of the 2′-OH group of a ribosyl sugar moiety. A “2′-NMA sugar moiety” or “2′-NMA moiety” is a sugar moiety with a 2′-O—CH2-C(═O)—NH—CH3 group in place of the 2′-OH group of a ribosyl sugar moiety. Unless otherwise indicated, a 2′-NMA sugar moiety is in the β-D configuration. “NMA” can mean O—N-methyl acetamide. As used herein, “2′-NMA nucleoside” can mean a nucleoside comprising a 2′-NMA sugar moiety.

[0228] In some embodiments, each monomer of the ASO is modified in the same way, for example, each linkage of the backbone of the ASO comprises a phosphorothioate linkage or each ribose sugar moiety comprises a 2′O-methyl modification. Such modifications that are present on each of the monomer components of an ASO are referred to as “uniform modifications.” In some examples, a combination of different modifications may be desired, for example, an ASO may comprise a combination of phosphorodiamidate linkages and sugar moieties comprising morpholine rings (morpholinos). Combinations of different modifications to an ASO are referred to as “mixed modifications” or “mixed chemistries.”

[0229] In some embodiments, the ASO comprises one or more backbone modifications. In some embodiments, the ASO comprises one or more sugar moiety modification. In some embodiments, the ASO comprises one or more backbone modifications and one or more sugar moiety modifications. In some embodiments, the ASO comprises a 2′MOE modification and a phosphorothioate backbone. In some embodiments, the ASO comprises a phosphorodiamidate morpholino (PMO). In some embodiments, the ASO comprises a peptide nucleic acid (PNA). Any of the ASOs or any component of an ASO (e.g., a nucleobase, sugar moiety, backbone) described herein may be modified in order to achieve desired properties or activities of the ASO or reduce undesired properties or activities of the ASO. For example, an ASO or one or more components of any ASO may be modified to enhance binding affinity to a target sequence on a pre-mRNA transcript; reduce binding to any non-target sequence; reduce degradation by cellular nucleases (i.e., RNase H); improve uptake of the ASO into a cell and/or into the nucleus of a cell; alter the pharmacokinetics or pharmacodynamics of the ASO; and/or modulate the half-life of the ASO.

[0230] In some embodiments, the ASOs are comprised of 2′-O-(2-methoxyethyl) (MOE) phosphorothioate-modified nucleotides. ASOs comprised of such nucleotides are especially well-suited to the methods disclosed herein; oligomers having such modifications have been shown to have significantly enhanced resistance to nuclease degradation and increased bioavailability, making them suitable, for example, for oral delivery in some embodiments described herein. See e.g., Geary, et al., J Pharmacol Exp Ther. 2001; 296(3):890-7; Geary, et al., J Pharmacol Exp Ther. 2001; 296(3):898-904.

[0231] Methods of synthesizing ASOs will be known to one of skill in the art. Alternatively or in addition, ASOs may be obtained from a commercial source.

[0232] Unless specified otherwise, the left-hand end of single-stranded nucleic acid (e.g., pre-mRNA transcript, oligonucleotide, ASO, etc.) sequences is the 5′ end and the left-hand direction of single or double-stranded nucleic acid sequences is referred to as the 5′ direction. Similarly, the right-hand end or direction of a nucleic acid sequence (single or double stranded) is the 3′ end or direction. Generally, a region or sequence that is 5′ to a reference point in a nucleic acid is referred to as “upstream,” and a region or sequence that is 3′ to a reference point in a nucleic acid is referred to as “downstream.” Generally, the 5′ direction or end of an mRNA is where the initiation or start codon is located, while the 3′ end or direction is where the termination codon is located. In some aspects, nucleotides that are upstream of a reference point in a nucleic acid may be designated by a negative number, while nucleotides that are downstream of a reference point may be designated by a positive number. For example, a reference point (e.g., an exon-exon junction in mRNA) may be designated as the “zero” site, and a nucleotide that is directly adjacent and upstream of the reference point is designated “minus one,” e.g., “−1,” while a nucleotide that is directly adjacent and downstream of the reference point is designated “plus one,” e.g., “+1.”

[0233] In some embodiments, the ASOs are complementary to (and bind to) a targeted portion of a SETD5 NIE containing pre-mRNA that is downstream (in the 3′ direction) of the 5′ splice site (or 3′ end of the NIE) of the included exon in a SETD5 NIE containing pre-mRNA (e.g., the direction designated by positive numbers relative to the 5′ splice site). In some embodiments, the ASOs are complementary to a targeted portion of the SETD5 NIE containing pre-mRNA that is within the region about +1 to about +500 relative to the 5′ splice site (or 3′ end) of the included exon. In some embodiments, the ASOs may be complementary to a targeted portion of a SETD5 NIE containing pre-mRNA that is within the region between nucleotides +6 and +40,000 relative to the 5′ splice site (or 3′ end) of the included exon. In some aspects, the ASOs are complementary to a targeted portion that is within the region about +1 to about +40,000, about +1 to about +30,000, about +1 to about +20,000, about +1 to about +15,000, about +1 to about +10,000, about +1 to about +5,000, about +1 to about +4,000, about +1 to about +3,000, about +1 to about +2,000, about +1 to about +1,000, about +1 to about +500, about +1 to about +490, about +1 to about +480, about +1 to about +470, about +1 to about +460, about +1 to about +450, about +1 to about +440, about +1 to about +430, about +1 to about +420, about +1 to about +410, about +1 to about +400, about +1 to about +390, about +1 to about +380, about +1 to about +370, about +1 to about +360, about +1 to about +350, about +1 to about +340, about +1 to about +330, about +1 to about +320, about +1 to about +310, about +1 to about +300, about +1 to about +290, about +1 to about +280, about +1 to about +270, about +1 to about +260, about +1 to about +250, about +1 to about +240, about +1 to about +230, about +1 to about +220, about +1 to about +210, about +1 to about +200, about +1 to about +190, about +1 to about +180, about +1 to about +170, about +1 to about +160, about +1 to about +150, about +1 to about +140, about +1 to about +130, about +1 to about +120, about +1 to about +110, about +1 to about +100, about +1 to about +90, about +1 to about +80, about +1 to about +70, about +1 to about +60, about +1 to about +50, about +1 to about +40, about +1 to about +30, or about +1 to about +20 relative to 5′ splice site (or 3′ end) of the included exon. In some aspects, the ASOs are complementary to a targeted portion that is within the region from about +1 to about +100, from about +100 to about +200, from about +200 to about +300, from about +300 to about +400, or from about +400 to about +500 relative to 5′ splice site (or 3′ end) of the included exon.

[0234] In some embodiments, the ASOs are complementary to (and bind to) a targeted portion of a SETD5 NIE containing pre-mRNA that is upstream (in the 5′ direction) of the 5′ splice site (or 3′ end) of the included exon in a SETD5 NIE containing pre-mRNA (e.g., the direction designated by negative numbers relative to the 5′ splice site). In some embodiments, the ASOs are complementary to a targeted portion of the SETD5 NIE containing pre-mRNA that is within the region about −4 to about −270 relative to the 5′ splice site (or 3′end) of the included exon. In some embodiments, the ASOs may be complementary to a targeted portion of a SETD5 NIE containing pre-mRNA that is within the region between nucleotides −1 and −40,000 relative to the 5′ splice site (or 3′ end) of the included exon. In some aspects, the ASOs are complementary to a targeted portion that is within the region about −1 to about −40,000, about −1 to about −30,000, about −1 to about −20,000, about −1 to about −15,000, about −1 to about −10,000, about −1 to about −5,000, about −1 to about −4,000, about −1 to about −3,000, about −1 to about −2,000, about −1 to about −1,000, about −1 to about −500, about −1 to about −490, about −1 to about −480, about −1 to about −470, about −1 to about −460, about −1 to about −450, about −1 to about −440, about −1 to about −430, about −1 to about −420, about −1 to about −410, about −1 to about −400, about −1 to about −390, about −1 to about −380, about −1 to about −370, about −1 to about −360, about −1 to about −350, about −1 to about −340, about −1 to about −330, about −1 to about −320, about −1 to about −310, about −1 to about −300, about −1 to about −290, about −1 to about −280, about −1 to about −270, about −1 to about −260, about −1 to about −250, about −1 to about −240, about −1 to about −230, about −1 to about −220, about −1 to about −210, about −1 to about −200, about −1 to about −190, about −1 to about −180, about −1 to about −170, about −1 to about −160, about −1 to about −150, about −1 to about −140, about −1 to about −130, about −1 to about −120, about −1 to about −110, about −1 to about −100, about −1 to about −90, about −1 to about −80, about −1 to about −70, about −1 to about −60, about −1 to about −50, about −1 to about −40, about −1 to about −30, or about −1 to about −20 relative to 5′ splice site (or 3′ end) of the included exon.

[0235] In some embodiments, the ASOs are complementary to a targeted region of a SETD5 NIE containing pre-mRNA that is upstream (in the 5′ direction) of the 3′ splice site (or 5′ end) of the included exon in a SETD5 NIE containing pre-mRNA (e.g., in the direction designated by negative numbers). In some embodiments, the ASOs are complementary to a targeted portion of the SETD5 NIE containing pre-mRNA that is within the region about −1 to about −500 relative to the 3′ splice site (or 5′ end) of the included exon. In some embodiments, the ASOs are complementary to a targeted portion of the SETD5 NIE containing pre-mRNA that is within the region −1 to −40,000 relative to the 3′ splice site of the included exon. In some aspects, the ASOs are complementary to a targeted portion that is within the region about −1 to about −40,000, about −1 to about −30,000, −1 to about −20,000, about −1 to about −15,000, about −1 to about −10,000, about −1 to about −5,000, about −1 to about −4,000, about −1 to about −3,000, about −1 to about −2,000, about −1 to about −1,000, about −1 to about −500, about −1 to about −490, about −1 to about −480, about −1 to about −470, about −1 to about −460, about −1 to about −450, about −1 to about −440, about −1 to about −430, about −1 to about −420, about −1 to about −410, about −1 to about −400, about −1 to about −390, about −1 to about −380, about −1 to about −370, about −1 to about −360, about −1 to about −350, about −1 to about −340, about −1 to about −330, about −1 to about −320, about −1 to about −310, about −1 to about −300, about −1 to about −290, about −1 to about −280, about −1 to about −270, about −1 to about −260, about −1 to about −250, about −1 to about −240, about −1 to about −230, about −1 to about −220, about −1 to about −210, about −1 to about −200, about −1 to about −190, about −1 to about −180, about −1 to about −170, about −1 to about −160, about −1 to about −150, about −1 to about −140, about −1 to about −130, about −1 to about −120, about −1 to about −110, about −1 to about −100, about −1 to about −90, about −1 to about −80, about −1 to about −70, about −1 to about −60, about −1 to about −50, about −1 to about −40, about −1 to about −30, or about −1 to about −20 relative to 3′ splice site of the included exon. In some aspects, the ASOs are complementary to a targeted portion that is within the region from about −1 to about −100, from about −100 to about −200, from about −200 to about −300, from about −300 to about −400, or from about −400 to about −500 relative to 3′ splice site of the included exon.

[0236] In some embodiments, the ASOs are complementary to a targeted region of a SETD5 NIE containing pre-mRNA that is downstream (in the 3′ direction) of the 3′ splice site (5′ end) of the included exon in a SETD5 NIE containing pre-mRNA (e.g., in the direction designated by positive numbers). In some embodiments, the ASOs are complementary to a targeted portion of the SETD5 NIE containing pre-mRNA that is within the region of about +1 to about +40,000 relative to the 3′ splice site of the included exon. In some aspects, the ASOs are complementary to a targeted portion that is within the region about +1 to about +40,000, about +1 to about +30,000, about +1 to about +20,000, about +1 to about +15,000, about +1 to about +10,000, about +1 to about +5,000, about +1 to about +4,000, about +1 to about +3,000, about +1 to about +2,000, about +1 to about +1,000, about +1 to about +500, about +1 to about +490, about +1 to about +480, about +1 to about +470, about +1 to about +460, about +1 to about +450, about +1 to about +440, about +1 to about +430, about +1 to about +420, about +1 to about +410, about +1 to about +400, about +1 to about +390, about +1 to about +380, about +1 to about +370, about +1 to about +360, about +1 to about +350, about +1 to about +340, about +1 to about +330, about +1 to about +320, about +1 to about +310, about +1 to about +300, about +1 to about +290, about +1 to about +280, about +1 to about +270, about +1 to about +260, about +1 to about +250, about +1 to about +240, about +1 to about +230, about +1 to about +220, about +1 to about +210, about +1 to about +200, about +1 to about +190, about +1 to about +180, about +1 to about +170, about +1 to about +160, about +1 to about +150, about +1 to about +140, about +1 to about +130, about +1 to about +120, about +1 to about +110, about +1 to about +100, about +1 to about +90, about +1 to about +80, about +1 to about +70, about +1 to about +60, about +1 to about +50, about +1 to about +40, about +1 to about +30, or about +1 to about +20, or about +1 to about +10 relative to 3′ splice site of the included exon.

[0237] In some embodiments, the targeted portion of the SETD5 NIE containing pre-mRNA is within the region +100 relative to the 5′ splice site (3′ end) of the included exon to −100 relative to the 3′ splice site (5′ end) of the included exon. In some embodiments, the targeted portion of the SETD5 NIE containing pre-mRNA is within the NIE. In some embodiments, the target portion of the SETD5 NIE containing pre-mRNA comprises a NMD exon and intron boundary.

[0238] The ASOs may be of any length suitable for specific binding and effective enhancement of splicing. In some embodiments, the ASOs consist of 8 to 50 nucleobases. For example, the ASO may be 8, 9, 10, 11, 12, 13, 14, 15, 16, 17, 18, 19, 20, 21, 22, 23, 24, 25, 26, 27, 28, 29, 30, 31, 32, 33, 34, 35, 40, 45, or 50 nucleobases in length. In some embodiments, the ASOs consist of more than 50 nucleobases. In some embodiments, the ASO is from 8 to 50 nucleobases, 8 to 40 nucleobases, 8 to 35 nucleobases, 8 to 30 nucleobases, 8 to 25 nucleobases, 8 to 20 nucleobases, 8 to 15 nucleobases, 9 to 50 nucleobases, 9 to 40 nucleobases, 9 to 35 nucleobases, 9 to 30 nucleobases, 9 to 25 nucleobases, 9 to 20 nucleobases, 9 to 15 nucleobases, 10 to 50 nucleobases, 10 to 40 nucleobases, 10 to 35 nucleobases, 10 to 30 nucleobases, 10 to 25 nucleobases, 10 to 20 nucleobases, 10 to 15 nucleobases, 11 to 50 nucleobases, 11 to 40 nucleobases, 11 to 35 nucleobases, 11 to 30 nucleobases, 11 to 25 nucleobases, 11 to 20 nucleobases, 11 to 15 nucleobases, 12 to 50 nucleobases, 12 to 40 nucleobases, 12 to 35 nucleobases, 12 to 30 nucleobases, 12 to 25 nucleobases, 12 to 20 nucleobases, 12 to 15 nucleobases, 13 to 50 nucleobases, 13 to 40 nucleobases, 13 to 35 nucleobases, 13 to 30 nucleobases, 13 to 25 nucleobases, 13 to 20 nucleobases, 14 to 50 nucleobases, 14 to 40 nucleobases, 14 to 35 nucleobases, 14 to 30 nucleobases, 14 to 25 nucleobases, 14 to 20 nucleobases, 15 to 50 nucleobases, 15 to 40 nucleobases, 15 to 35 nucleobases, 15 to 30 nucleobases, 15 to 25 nucleobases, 15 to 20 nucleobases, 20 to 50 nucleobases, 20 to 40 nucleobases, 20 to 35 nucleobases, 20 to 30 nucleobases, 20 to 25 nucleobases, 25 to 50 nucleobases, 25 to 40 nucleobases, 25 to 35 nucleobases, or 25 to 30 nucleobases in length. In some embodiments, the ASOs are 18 nucleotides in length. In some embodiments, the ASOs are 15 nucleotides in length. In some embodiments, the ASOs are 25 nucleotides in length.

[0239] In some embodiments, two or more ASOs with different chemistries but complementary to the same targeted portion of the NIE containing pre-mRNA are used. In some embodiments, two or more ASOs that are complementary to different targeted portions of the NIE containing pre-mRNA are used.

[0240] In some embodiments, the antisense oligonucleotides of the disclosure are chemically linked to one or more moieties or conjugates, e.g., a targeting moiety or other conjugate that enhances the activity or cellular uptake of the oligonucleotide. Such moieties include, but are not limited to, a lipid moiety, e.g., as a cholesterol moiety, a cholesteryl moiety, an aliphatic chain, e.g., dodecandiol or undecyl residues, a polyamine or a polyethylene glycol chain, or adamantane acetic acid. Oligonucleotides comprising lipophilic moieties and preparation methods have been described in the published literature. In embodiments, the antisense oligonucleotide is conjugated with a moiety including, but not limited to, an abasic nucleotide, a polyether, a polyamine, a polyamide, a peptides, a carbohydrate, e.g., N-acetylgalactosamine (GalNAc), N-Ac-Glucosamine (GluNAc), or mannose (e.g., mannose-6-phosphate), a lipid, or a polyhydrocarbon compound. Conjugates can be linked to one or more of any nucleotides comprising the antisense oligonucleotide at any of several positions on the sugar, base or phosphate group, as understood in the art and described in the literature, e.g., using a linker. Linkers can include a bivalent or trivalent branched linker. In embodiments, the conjugate is attached to the 3′ end of the antisense oligonucleotide. Methods of preparing oligonucleotide conjugates are described, e.g., in U.S. Pat. No. 8,450,467, “Carbohydrate conjugates as delivery agents for oligonucleotides,” incorporated by reference herein.

[0241] In some embodiments, the nucleic acid to be targeted by an ASO is a SETD5 NIE containing pre-mRNA expressed in a cell, such as a eukaryotic cell. In some embodiments, the term “cell” may refer to a population of cells. In some embodiments, the cell is in a subject. In some embodiments, the cell is isolated from a subject. In some embodiments, the cell is ex vivo. In some embodiments, the cell is a condition or disease-relevant cell or a cell line. In some embodiments, the cell is in vitro (e.g., in cell culture).

[0242] In some embodiments, an ASO that targets a pre-mRNA disclosed herein is selected from the group consisting of the sequences listed in Table 4 (e.g., the sequence set forth in any one of SEQ ID NO: 1-331).

### Pharmaceutical Compositions

[0243] Pharmaceutical compositions or formulations comprising the agent, e.g., antisense oligonucleotide, of the described compositions and for use in any of the described methods can be prepared according to conventional techniques well known in the pharmaceutical industry and described in the published literature. In embodiments, a pharmaceutical composition or formulation for treating a subject comprises an effective amount of any antisense oligomer as described herein, or a pharmaceutically acceptable salt, solvate, hydrate or ester thereof. The pharmaceutical formulation comprising an antisense oligomer may further comprise a pharmaceutically acceptable excipient, diluent or carrier.

[0244] Pharmaceutically acceptable salts are suitable for use in contact with the tissues of humans and lower animals without undue toxicity, irritation, allergic response, etc., and are commensurate with a reasonable benefit/risk ratio. (See, e.g., S. M. Berge, et al., J. Pharmaceutical Sciences, 66: 1-19 (1977), incorporated herein by reference for this purpose. The salts can be prepared in situ during the final isolation and purification of the compounds, or separately by reacting the free base form with a suitable organic acid. Examples of pharmaceutically acceptable, nontoxic acid addition salts are salts of an amino group formed with inorganic acids such as hydrochloric acid, hydrobromic acid, phosphoric acid, sulfuric acid and perchloric acid or with organic acids such as acetic acid, oxalic acid, maleic acid, tartaric acid, citric acid, succinic acid or malonic acid or by using other documented methodologies such as ion exchange. Other pharmaceutically acceptable salts include adipate, alginate, ascorbate, aspartate, benzenesulfonate, benzoate, bisulfate, borate, butyrate, camphorate, camphorsulfonate, citrate, cyclopentanepropionate, digluconate, dodecylsulfate, ethanesulfonate, formate, fumarate, glucoheptonate, glycerophosphate, gluconate, hemisulfate, heptanoate, hexanoate, hydroiodide, 2-hydroxy-ethanesulfonate, lactobionate, lactate, laurate, lauryl sulfate, malate, maleate, malonate, methanesulfonate, 2-naphthalenesulfonate, nicotinate, nitrate, oleate, oxalate, palmitate, pamoate, pectinate, persulfate, 3-phenylpropionate, phosphate, picrate, pivalate, propionate, stearate, succinate, sulfate, tartrate, thiocyanate, p-toluenesulfonate, undecanoate, valerate salts, and the like. Representative alkali or alkaline earth metal salts include sodium, lithium, potassium, calcium, magnesium, and the like. Further pharmaceutically acceptable salts include, when appropriate, nontoxic ammonium, quaternary ammonium, and amine cations formed using counterions such as halide, hydroxide, carboxylate, sulfate, phosphate, nitrate, loweralkyl sulfonate and aryl sulfonate.

[0245] In some embodiments, the compositions are formulated into any of many possible dosage forms such as, but not limited to, tablets, capsules, gel capsules, liquid syrups, soft gels, suppositories, and enemas. In embodiments, the compositions are formulated as suspensions in aqueous, non-aqueous or mixed media. Aqueous suspensions may further contain substances that increase the viscosity of the suspension including, for example, sodium carboxymethylcellulose, sorbitol and/or dextran. The suspension may also contain stabilizers. In embodiments, a pharmaceutical formulation or composition of the present disclosure includes, but is not limited to, a solution, emulsion, microemulsion, foam or liposome-containing formulation (e.g., cationic or noncationic liposomes).

[0246] The pharmaceutical composition or formulation described herein may comprise one or more penetration enhancers, carriers, excipients or other active or inactive ingredients as appropriate and well known to those of skill in the art or described in the published literature. In embodiments, liposomes also include sterically stabilized liposomes, e.g., liposomes comprising one or more specialized lipids. These specialized lipids result in liposomes with enhanced circulation lifetimes. In embodiments, a sterically stabilized liposome comprises one or more glycolipids or is derivatized with one or more hydrophilic polymers, such as a polyethylene glycol (PEG) moiety. In some embodiments, a surfactant is included in the pharmaceutical formulation or compositions. The use of surfactants in drug products, formulations and emulsions is well known in the art. In embodiments, the present disclosure employs a penetration enhancer to effect the efficient delivery of the antisense oligonucleotide, e.g., to aid diffusion across cell membranes and/or enhance the permeability of a lipophilic drug. In some embodiments, the penetration enhancers are a surfactant, fatty acid, bile salt, chelating agent, or non-chelating nonsurfactant.

[0247] In some embodiments, the pharmaceutical formulation comprises multiple antisense oligonucleotides. In embodiments, the antisense oligonucleotide is administered in combination with another drug or therapeutic agent.

### Combination Therapies

[0248] In some embodiments, provided herein is a composition comprising one or more NSAE-modulating agents. In some embodiments, provided herein is a composition comprising two or more NSAE-modulating agents. In some embodiments, provided herein is a composition comprising one or more ASO complementary to a targeted region of SETD5 pre-mRNA. In some embodiments, provided herein is a composition comprising two or more ASO complementary to a targeted region of SETD5 pre-mRNA. In some embodiments, provided herein is a composition comprising one or more ASO complementary to a same targeted region of SETD5 pre-mRNA. In some embodiments, provided herein is a composition comprising two or more ASO complementary to a same targeted region of SETD5 pre-mRNA. In some embodiments, provided herein is a composition comprising one or more ASO complementary to different targeted regions of SETD5 pre-mRNA. In some embodiments, provided herein is a composition comprising two or more ASO complementary to different targeted regions of SETD5 pre-mRNA. In some embodiments, provided herein is a composition comprising one or more ASOs of Table 4 (e.g., the sequence set forth in any one of SEQ ID NO: 1-331). In some embodiments, provided herein is a composition comprising two and more ASOs of in Table 4 (e.g., the sequence set forth in any one of SEQ ID NO: 1-331).

[0249] In some embodiments, the ASOs disclosed in the present disclosure can be used in combination with one or more additional therapeutic agents. In some embodiments, the one or more additional therapeutic agents can comprise a small molecule. For example, the one or more additional therapeutic agents can comprise a small molecule described in WO2016128343A1, WO2017053982A1, WO2016196386A1, WO201428459A1, WO201524876A2, WO2013119916A2, and WO2014209841A2, which are incorporated by reference herein in their entirety. In some embodiments, the one or more additional therapeutic agents comprise an ASO that can be used to correct intron retention.

### Treatment of Subjects

[0250] Any of the compositions provided herein may be administered to an individual. “Individual” may be used interchangeably with “subject” or “patient.” An individual may be a mammal, for example, a human or animal such as a non-human primate, a rodent, a rabbit, a rat, a mouse, a horse, a donkey, a goat, a cat, a dog, a cow, a pig, or a sheep. In embodiments, the individual is a human. In embodiments, the individual is a fetus, an embryo, or a child. In other embodiments, the individual may be another eukaryotic organism, such as a plant. In some embodiments, the compositions provided herein are administered to a cell ex vivo.

[0251] In some embodiments, the compositions provided herein are administered to an individual as a method of treating a disease or disorder. In some embodiments, the individual has a genetic disease, such as any of the diseases described herein. In some embodiments, the individual is at risk of having a disease, such as any of the diseases described herein. In some embodiments, the individual is at increased risk of having a disease or disorder caused by insufficient amount of a protein or insufficient activity of a protein. If an individual is “at an increased risk” of having a disease or disorder caused insufficient amount of a protein or insufficient activity of a protein, the method involves preventative or prophylactic treatment. For example, an individual may be at an increased risk of having such a disease or disorder because of family history of the disease. Typically, individuals at an increased risk of having such a disease or disorder benefit from prophylactic treatment (e.g., by preventing or delaying the onset or progression of the disease or disorder). In embodiments, a fetus is treated in utero, e.g., by administering the ASO composition to the fetus directly or indirectly (e.g., via the mother).

[0252] Suitable routes for administration of ASOs of the present disclosure may vary depending on cell type to which delivery of the ASOs is desired. The ASOs of the present disclosure may be administered to patients parenterally, for example, by intrathecal injection, intracerebroventricular injection, intraperitoneal injection, intramuscular injection, subcutaneous injection, or intravenous injection.

[0253] In embodiments, the antisense oligonucleotide is administered with one or more agents capable of promoting penetration of the subject antisense oligonucleotide across the blood-brain barrier by any method known in the art. For example, delivery of agents by administration of an adenovirus vector to motor neurons in muscle tissue is described in U.S. Pat. No. 6,632,427, “Adenoviral-vector-mediated gene transfer into medullary motor neurons,” incorporated herein by reference. Delivery of vectors directly to the brain, e.g., the striatum, the thalamus, the hippocampus, or the substantia nigra, is described, e.g., in U.S. Pat. No. 6,756,523, “Adenovirus vectors for the transfer of foreign genes into cells of the central nervous system particularly in brain,” incorporated herein by reference.

[0254] In some embodiments, the antisense oligonucleotides are linked or conjugated with agents that provide desirable pharmaceutical or pharmacodynamic properties. In embodiments, the antisense oligonucleotide is coupled to a substance, known in the art to promote penetration or transport across the blood-brain barrier, e.g., an antibody to the transferrin receptor. In embodiments, the antisense oligonucleotide is linked with a viral vector, e.g., to render the antisense compound more effective or increase transport across the blood-brain barrier. In embodiments, osmotic blood brain barrier disruption is assisted by infusion of sugars, e.g., meso-erythritol, xylitol, D(+) galactose, D(+) lactose, D(+) xylose, dulcitol, myo-inositol, L(−) fructose, D(−) mannitol, D(+) glucose, D(+) arabinose, D(−) arabinose, cellobiose, D(+) maltose, D(+) raffinose, L(+) rhamnose, D(+) melibiose, D(−) ribose, adonitol, D(+) arabitol, L(−) arabitol, D(+) fucose, L(−) fucose, D(−) lyxose, L(+) lyxose, and L(−) lyxose, or amino acids, e.g., glutamine, lysine, arginine, asparagine, aspartic acid, cysteine, glutamic acid, glycine, histidine, leucine, methionine, phenylalanine, proline, serine, threonine, tyrosine, valine, and taurine. Methods and materials for enhancing blood brain barrier penetration are described, e.g., in U.S. Pat. No. 9,193,969, “Compositions and methods for selective delivery of oligonucleotide molecules to specific neuron types,” U.S. Pat. No. 4,866,042, “Method for the delivery of genetic material across the blood brain barrier,” U.S. Pat. No. 6,294,520, “Material for passage through the blood-brain barrier,” and U.S. Pat. No. 6,936,589, “Parenteral delivery systems,” each incorporated herein by reference.

[0255] In some embodiments, an ASO of the disclosure is coupled to a dopamine reuptake inhibitor (DRI), a selective serotonin reuptake inhibitor (SSRI), a noradrenaline reuptake inhibitor (NRI), a norepinephrine-dopamine reuptake inhibitor (NDRI), and a serotonin-norepinephrine-dopamine reuptake inhibitor (SNDRI), using methods described in, e.g., U.S. Pat. No. 9,193,969, incorporated herein by reference.

[0256] In some embodiments, subjects treated using the methods and compositions are evaluated for improvement in condition using any methods known and described in the art.

[0257] In some cases, a therapeutic agent comprises a modified snRNA, such as a modified human snRNA. In some cases, a therapeutic agent comprises a vector, such as a viral vector, that encodes a modified snRNA. In some embodiments, the modified snRNA is a modified U1 snRNA (see, e.g., Alanis et al., Human Molecular Genetics, 2012, Vol. 21, No. 11 2389-2398). In some embodiments, the modified snRNA is a modified U7 snRNA (see, e.g., Gadgil et al., J Gene Med. 2021; 23:e3321). Modified U7 snRNAs can be made by any method known in the art including the methods described in Meyer, K.; Schümperli, Daniel (2012), Antisense Derivatives of U7 Small Nuclear RNA as Modulators of Pre-mRNA Splicing. In: Stamm, Stefan; Smith, Christopher W. J.; Lührmann, Reinhard (eds.) Alternative pre-mRNA Splicing: Theory and Protocols (pp. 481-494), Chichester: John Wiley & Sons 10.1002/9783527636778.ch45, incorporated by reference herein in its entirety. In some embodiments, a modified U7 (smOPT) does not compete with WT U7 (Stefanovic et al., 1995).

[0258] In some embodiments, the modified snRNA comprises an smOPT modification. For example, the modified snRNA can comprise a sequence AAUUUUUGGAG (SEQ ID NO: 409). For example, the sequence AAUUUUUGGAG (SEQ ID NO: 409) can replace a sequence AAUUUGUCUAG (SEQ ID NO: 510) in a wild-type U7 snRNA to generate the modified U& snRNA (smOPT). In some embodiments, a smOPT modification of a U7 snRNA renders the particle functionally inactive in histone pre-mRNA processing (Stefanovic et al., 1995). In some embodiments, a modified U7 (smOPT) is expressed stably in the nucleus and at higher levels than WT U7 (Stefanovic et al., 1995). In some embodiments, the snRNA comprises a U1 snRNP-targeted sequence. In some embodiments, the snRNA comprises a U7 snRNP-targeted sequence. In some embodiments, the snRNA comprises a modified U7 snRNP-targeted sequence and wherein the modified U7 snRNP-targeted sequence comprises smOPT. In some embodiments, the modified snRNA has been modified to comprise a single-stranded nucleotide sequence that hybridizes to a SETD5 pre-mRNA. In some embodiments, the modified snRNA has been modified to comprise a single-stranded nucleotide sequence that hybridizes to a SETD5 mRNA. Exemplary sequences of mouse U7 vector that can be used in the subject compositions and methods include those listed in Table 5. In some embodiments, the antisense oligomer sequence in a U1 or U7 vector disclosed herein has a sequence at least 75%, at least 80%, at least 85%, at least 90%, at least 95%, at least 98%, at least 99%, or 100% identical to a sequence listed in Table 4 (e.g., the sequence set forth in any one of SEQ ID NO: 1-331).

[0259] In some embodiments, the modified snRNA has been modified to comprise a single-stranded nucleotide sequence that hybridizes to a target region of a SETD5 pre-mRNA or a processed SETD5 mRNA, such as a target region of a SETD5 pre-mRNA that modulates exclusion of an NMD exon, a target region of a SETD5 pre-mRNA that modulates exclusion of a first exon that comprises a translational start site. In some embodiments, the modified snRNA has been modified to comprise a single-stranded nucleotide sequence that comprises one or two or more sequences of the ASOs disclosed herein. In some embodiments, the modified snRNA has been modified to comprise a single-stranded nucleotide sequence that hybridizes to sequence of a SETD5 pre-mRNA with a mutation, such as a SETD5 NMD exon-containing pre-mRNA with a mutation, or a SETD5 pre-mRNA with a mutation containing a first exon that comprises a translational start site. In some embodiments, the modified snRNA has been modified to comprise a single-stranded nucleotide sequence that comprises two or more sequences that hybridize to two or more target regions of a SETD5 NMD exon-containing pre-mRNA. For example, a modified snRNA can be modified to comprise a single-stranded nucleotide sequence that hybridizes to at least 8 contiguous nucleic acids of a SETD5 NMD exon-containing pre-mRNA. In some embodiments, the modified snRNA has been modified to comprise a single-stranded nucleotide sequence that hybridizes to any of the target regions of a SETD5 NMD exon-containing pre-mRNA disclosed herein. In some embodiments, the modified snRNA has been modified to comprise a single-stranded nucleotide sequence that comprises two or more sequences that hybridize to two or more target regions of a SETD5 NMD exon-containing pre-mRNA. For example, a modified snRNA can be modified to comprise a single-stranded nucleotide sequence that hybridizes to one or two or more sequences of an intron containing an NMD exon (e.g., Exon 5X of SETD5) of the pre-mRNA transcript or to a NMD exon-activating regulatory sequence in the same intron. For example, a modified snRNA can be modified to comprise a single-stranded nucleotide sequence that hybridizes to a region within an NMD exon or upstream or downstream of an NMD exon (e.g., Exon 5X of SETD5). In some embodiments, the modified snRNA has a 5′ region that has been modified to comprise a single-stranded nucleotide sequence that hybridizes to a SETD5 NMD exon-containing pre-mRNA. In some embodiments, the modified snRNA has a 3′ region that has been modified to comprise a single-stranded nucleotide sequence that hybridizes to a SETD5 NMD exon-containing pre-mRNA.

[0260] In some embodiments, the modified snRNA has been modified to comprise a single-stranded nucleotide sequence that hybridizes to a target region of a SETD5 pre-mRNA that modulates exclusion of an NMD exon. For example, a modified snRNA can be modified to comprise a single-stranded nucleotide sequence that hybridizes to a region that overlaps with an NMD exon and an intron upstream of the NMD exon (e.g., Exon 5X of SETD5). For example, a modified snRNA can be modified to comprise a single-stranded nucleotide sequence that hybridizes to a region that overlaps with an NMD exon and an intron downstream of the NMD exon (e.g., Exon 5X of SETD5). For example, a modified snRNA can be modified to comprise a single-stranded nucleotide sequence that is complementary to an intron sequence that is downstream of an NMD exon (e.g., Exon 5X of SETD5). For example, a modified snRNA can be modified to comprise a single-stranded nucleotide sequence that is complementary to a 3′ splice site of an intron sequence that is downstream of an NMD exon (e.g., Exon 5X of SETD5). For example, a modified snRNA can be modified to comprise a single-stranded nucleotide sequence that is complementary to a 5′ splice site of an intron sequence that is downstream of an NMD exon (e.g., Exon 5X of SETD5). For example, a modified snRNA can be modified to comprise a single-stranded nucleotide sequence that is complementary to an intron sequence that is upstream of an NMD exon (e.g., Exon 5X of SETD5). For example, a modified snRNA can be modified to comprise a single-stranded nucleotide sequence that is complementary to a splice site of an intron sequence that is upstream of an NMD exon (e.g., Exon 5X of SETD5). For example, a modified snRNA can be modified to comprise a single-stranded nucleotide sequence that is complementary to a 3′ splice site of an intron sequence that is upstream of an NMD exon (e.g., Exon 5X of SETD5). For example, a modified snRNA can be modified to comprise a single-stranded nucleotide sequence that is complementary to a 5′ splice site of an intron sequence that is upstream of an NMD exon (e.g., Exon 5X of SETD5).

[0261] In some embodiments, the modified snRNA has been modified to comprise a single-stranded nucleotide sequence that hybridizes to a target region of a SETD5 pre-mRNA that modulates exclusion of a first exon that comprises a translational start site, such as an NMD-exon that comprises a translational start site. For example, a modified snRNA can be modified to comprise a single-stranded nucleotide sequence that hybridizes to a region that is whin an intron containing a first NMD-exon that comprises a translational start site. For example, a modified snRNA can be modified to comprise a single-stranded nucleotide sequence that hybridizes to a region that is upstream of a first exon that comprises a translational start site, such a region within an intron upstream of a first exon that comprises a translational start site. For example, a modified snRNA can be modified to comprise a single-stranded nucleotide sequence that hybridizes to a region that is downstream of a first exon that comprises a translational start site, such a region within an intron downstream of a first exon that comprises a translational start site. For example, a modified snRNA can be modified to comprise a single-stranded nucleotide sequence that hybridizes to a region that is within of a first exon that comprises a translational start site. For example, a modified snRNA can be modified to comprise a single-stranded nucleotide sequence that hybridizes to a region that is overlaps with a splice site of a first exon that comprises a translational start site. For example, a modified snRNA can be modified to comprise a single-stranded nucleotide sequence that hybridizes to a region that is overlaps with a 3′ splice site of a first exon that comprises a translational start site. For example, a modified snRNA can be modified to comprise a single-stranded nucleotide sequence that hybridizes to a region that is overlaps with a 5′ splice site of a first exon that comprises a translational start site.

Methods of Identifying Additional ASOs that Induce Exon Skipping

[0262] Also within the scope of the present disclosure are methods for identifying or determining ASOs that induce exon skipping of a SETD5 NIE containing pre-mRNA. For example, a method can comprise identifying or determining ASOs that induce NMD exon skipping of a SETD5 NIE containing pre-mRNA. ASOs that specifically hybridize to different nucleotides within the target region of the pre-mRNA may be screened to identify or determine ASOs that improve the rate and/or extent of splicing of the target intron. In some embodiments, the ASO may block or interfere with the binding site(s) of a splicing repressor(s)/silencer. Any method known in the art may be used to identify (determine) an ASO that when hybridized to the target region of the exon results in the desired effect (e.g., NMD exon skipping, protein or functional RNA production). These methods also can be used for identifying ASOs that induce exon skipping of the included exon by binding to a targeted region in an intron flanking the included exon, or in a non-included exon. An example of a method that may be used is provided below.

[0263] A round of screening, referred to as an ASO “walk” may be performed using ASOs that have been designed to hybridize to a target region of a pre-mRNA. For example, the ASOs used in the ASO walk can be tiled every 5 nucleotides from approximately 100 nucleotides upstream of the 3′ splice site of the included exon (e.g., a portion of sequence of the exon located upstream of the target/included exon) to approximately 100 nucleotides downstream of the 3′ splice site of the target/included exon and/or from approximately 100 nucleotides upstream of the 5′ splice site of the included exon to approximately 100 nucleotides downstream of the 5′ splice site of the target/included exon (e.g., a portion of sequence of the exon located downstream of the target/included exon). For example, a first ASO of 15 nucleotides in length may be designed to specifically hybridize to nucleotides +6 to +20 relative to the 3′ splice site of the target/included exon. A second ASO may be designed to specifically hybridize to nucleotides +11 to +25 relative to the 3′ splice site of the target/included exon. ASOs are designed as such spanning the target region of the pre-mRNA. In embodiments, the ASOs can be tiled more closely, e.g., every 1, 2, 3, or 4 nucleotides. Further, the ASOs can be tiled from 100 nucleotides downstream of the 5′ splice site, to 100 nucleotides upstream of the 3′ splice site. In some embodiments, the ASOs can be tiled from about 1,160 nucleotides upstream of the 3′ splice site, to about 500 nucleotides downstream of the 5′ splice site. In some embodiments, the ASOs can be tiled from about 500 nucleotides upstream of the 3′ splice site, to about 1,920 nucleotides downstream of the 3′ splice site.

[0264] One or more ASOs, or a control ASO (an ASO with a scrambled sequence, sequence that is not expected to hybridize to the target region) are delivered, for example, by transfection, into a disease-relevant cell line that expresses the target pre-mRNA (e.g., a NIE containing pre-mRNA described herein). The exon skipping effects of each of the ASOs may be assessed by any method known in the art, for example, by reverse transcriptase (RT)-PCR using primers that span the splice junction, as described in Example 4. A reduction or absence of a longer RT-PCR product produced using the primers spanning the region containing the included exon (e.g., including the flanking exons of the NIE) in ASO-treated cells as compared to in control ASO-treated cells indicates that splicing of the target NIE has been enhanced. In some embodiments, the exon skipping efficiency (or the splicing efficiency to splice the intron containing the NIE), the ratio of spliced to unspliced pre-mRNA, the rate of splicing, or the extent of splicing may be improved using the ASOs described herein. The amount of protein or functional RNA that is encoded by the target pre-mRNA can also be assessed to determine whether each ASO achieved the desired effect (e.g., enhanced functional protein production). Any method known in the art for assessing and/or quantifying protein production, such as Western blotting, flow cytometry, immunofluorescence microscopy, and ELISA, can be used.

[0265] A second round of screening, referred to as an ASO “micro-walk” may be performed using ASOs that have been designed to hybridize to a target region of a pre-mRNA. The ASOs used in the ASO micro-walk are tiled every 1 nucleotide to further refine the nucleotide acid sequence of the pre-mRNA that when hybridized with an ASO results in exon skipping (or enhanced splicing of NIE).

[0266] Regions defined by ASOs that promote splicing of the target intron are explored in greater detail by means of an ASO “micro-walk”, involving ASOs spaced in 1-nt steps, as well as longer ASOs, typically 18-25 nt.

[0267] As described for the ASO walk above, the ASO micro-walk is performed by delivering one or more ASOs, or a control ASO (an ASO with a scrambled sequence, sequence that is not expected to hybridize to the target region), for example by transfection, into a disease-relevant cell line that expresses the target pre-mRNA. The splicing-inducing effects of each of the ASOs may be assessed by any method known in the art, for example by reverse transcriptase (RT)-PCR using primers that span the NIE, as described herein (see, e.g., Example 4). A reduction or absence of a longer RT-PCR product produced using the primers spanning the NIE in ASO-treated cells as compared to in control ASO-treated cells indicates that exon skipping (or splicing of the target intron containing an NIE) has been enhanced. In some embodiments, the exon skipping efficiency (or the splicing efficiency to splice the intron containing the NIE), the ratio of spliced to unspliced pre-mRNA, the rate of splicing, or the extent of splicing may be improved using the ASOs described herein. The amount of protein or functional RNA that is encoded by the target pre-mRNA can also be assessed to determine whether each ASO achieved the desired effect (e.g., enhanced functional protein production). Any method known in the art for assessing and/or quantifying protein production, such as Western blotting, flow cytometry, immunofluorescence microscopy, and ELISA, can be used.

[0268] ASOs that when hybridized to a region of a pre-mRNA result in exon skipping (or enhanced splicing of the intron containing a NIE) and increased protein production may be tested in vivo using animal models, for example, transgenic mouse models in which the full-length human gene has been knocked-in or in humanized mouse models of disease. Suitable routes for administration of ASOs may vary depending on the disease and/or the cell types to which delivery of the ASOs is desired. ASOs may be administered, for example, by intrathecal injection, intracerebroventricular injection, intraperitoneal injection, intramuscular injection, subcutaneous injection, or intravenous injection. Following administration, the cells, tissues, and/or organs of the model animals may be assessed to determine the effect of the ASO treatment by, for example, evaluating splicing (e.g., efficiency, rate, extent) and protein production by methods known in the art and described herein. The animal models may also be any phenotypic or behavioral indication of the disease or disease severity.

[0269] Also within the scope of the present disclosure is a method to identify or validate an NMD-inducing exon in the presence of an NMD inhibitor, for example, cycloheximide. An exemplary method is provided in Example 2.

TABLE 1
List of exemplary target gene sequences

| Gene | Gene | | | |
|---|---|---|---|---|
| Symbol | ID No. | Disease | OMIM | Genetics |
| SETD5 | 55209 | intellectual disability, | 615743 | Haploinsufficient, |
| | | autism spectrum disorder | | Loss-of-function |

Lengthy table referenced here
US20260035694A1-20260205-T00001
Please refer to the end of the specification for access instructions.

Lengthy table referenced here
US20260035694A1-20260205-T00002
Please refer to the end of the specification for access instructions.

Lengthy table referenced here
US20260035694A1-20260205-T00003
Please refer to the end of the specification for access instructions.

Lengthy table referenced here
US20260035694A1-20260205-T00004
Please refer to the end of the specification for access instructions.

Lengthy table referenced here
US20260035694A1-20260205-T00005
Please refer to the end of the specification for access instructions.

### EXAMPLES

[0270] The present disclosure will be more specifically illustrated by the following Examples. However, it should be understood that the present disclosure is not limited by these examples in any manner.

### Example 1: Identification of NMD-Inducing Exon Inclusion Events in Transcripts by RNAseq Using Next-Generation Sequencing

[0271] Whole transcriptome shotgun sequencing is carried out using next-generation sequencing to reveal a snapshot of transcripts produced by the genes described herein to identify NIE inclusion events. For this purpose, polyA+RNA from nuclear and cytoplasmic fractions of human cells are isolated and cDNA libraries are constructed using Illumina's TruSeq Stranded mRNA library prep kit. The libraries are pair-end sequenced, resulting in 100-nucleotide reads that are mapped to the human genome (Grch38/hg38 assembly). FIGS. 2 and 6 depict identification of different exemplary nonsense-mediated mRNA decay (NMD)-inducing exons in various genes.

[0272] Exemplary genes are summarized in Table 1. The sequence for each intron is summarized in Table 2.

### Example 2: Confirmation of NIE Via Cycloheximide Treatment

[0273] RT-PCR analysis using cytoplasmic RNA from DMSO-treated or cycloheximide-treated SK-N-AS (neuroblastoma), ReNcell VM cells (neural progenitor cells), or U87-MG (likely glioblastoma) cells and primers in exons can confirm the presence of a band corresponding to an NMD-inducing exon. The identity of the product is confirmed by sequencing. Densitometry analysis of the bands is performed to calculate the percentage of NMD exon inclusion of total transcript. Treatment of cells with cycloheximide to inhibit NMD can lead to an increase of the product corresponding to the NMD-inducing exon in the cytoplasmic fraction. FIGS. 3B and 7B depict confirmation of exemplary NIE exons in various gene transcripts using cycloheximide treatment, respectively.

[0274] FIGS. 3C and 7C show quantification of the RT-PCR products using RNA from various 2-month-old mouse brain regions plotted as a percentage of exon inclusion isoform (Exon inc/(Exon inc +productive mRNA)*100).

[0275] FIGS. 3D and 7D show quantification of the RT-PCR products using RNA from various non-human primate brain regions plotted as a percentage of exon inclusion isoform (Exon inc/(Exon inc +productive mRNA)*100).

### Example 3: NMD Exon Region ASO Walk

[0276] An ASO walk is performed for NMD exon region targeting sequences immediately upstream of the 3′ splice site, across the 3′splice site, the NMD exon, across the 5′ splice site, and downstream of the 5′ splice site using ASOs. ASOs are designed to cover these regions by shifting 5 nucleotides at a time. FIGS. 4, 8, and 9 depict ASO walks for various exemplary NIE exon regions, respectively.

### Example 4: NMD Exon Region ASO Walk Evaluated by RT-PCR

[0277] ASO walk sequences can be evaluated by, for example, RT-PCR. PAGE can be used to show SYBR safe-stained RT-PCR products of ReNcell VM cells treated with a ASO targeting the NMD exon regions as described herein at 2 μM concentration in human cells by gymnotic uptake. Products corresponding to NMD exon inclusion and full-length are quantified and the percentage of NMD exon inclusion is plotted; full-length products can be normalized to an RPL32 internal control and fold-change relative to the control can be plotted. FIGS. 5A, 5B, and 5C depict evaluation via RT-PCR of various exemplary ASO walks along exemplary NIE exon regions, respectively.

### Example 5: NMD Exon Region ASO Walk Evaluated by RT-qPCR

[0278] SYBR green RT-qPCR amplification results normalized to RPL32, can be obtained using the same ASO uptake experiment that can be evaluated by SYBR-safe RT-PCR, and can be plotted as fold change relative to Sham to confirm SYBR-safe RT-PCR results. FIGS. 5A, 5B, and 5C depict evaluation via RT-qPCR of various exemplary ASO walks along exemplary NIE exon regions, respectively.

[0279] FIG. 5A depicts TaqMan qPCR using RNA from ReNcell VM cells evaluated 24 hours after nucleofection with 2 μM ASOs from region 1 depicted in FIG. 4. TaqMan probe spans the Exons 5 and 6 junction (based on the transcript NM_001080517) and measures productive mRNA.

[0280] FIG. 5B depicts TaqMan qPCR using RNA from ReNcell VM cells evaluated 24 hours after nucleofection with 2 μM ASOs from region 2 depicted in FIG. 4. TaqMan probe spans the Exons 5 and 6 junction (based on the transcript NM_001080517) and measures productive mRNA.

[0281] FIG. 5C depicts TaqMan qPCR using RNA from ReNcell VM cells evaluated 24 hours after nucleofection with 2 μM ASOs from region 3 depicted in FIG. 4. TaqMan probe spans the Exons 5 and 6 junction (based on the transcript NM_001080517) and measures productive mRNA.

### Example 6: Dose-Dependent Effect of Selected ASO in CXH-Treated Cells

[0282] PAGE can be used to show SYBR safe-stained RT-PCR products of mock-treated (Sham, RNAiMAX alone), or treatment with ASOs targeting NMD exons at 30 nM, 80 nM, and 200 nM concentrations in mouse or human cells by RNAiMAX transfection. Products corresponding to NMD exon inclusion and full-length are quantified and the percentage of NMD exon inclusion can be plotted. The full-length products can also be normalized to HPRT internal control, and fold-change relative to Sham can be plotted.

### Example 7: Intracerebroventricular (ICV) Injection of Selected ASOs

[0283] PAGEs of SYBR safe-stained RT-PCR products of mice from uninjected (-, no ASO control), or 300 ag of Cep290 (negative control ASO; Gerard et al, Mol. Ther. Nuc. Ac., 2015), ASO-injected brains. Products corresponding to NMD exon inclusion and full-length can be quantified and the percentage of NMD exon inclusion can be plotted. TaqMan PCR can be performed using two different probes spanning NMD exon junctions and the products can be normalized to GAPDH internal control, and fold-change of ASO-injected relative to Cep290-injected brains can be plotted.

### Example 8: Intravenous (IV) Injection of Selected ASOs

[0284] PAGEs of SYBR safe-stained RT-PCR products of mice from uninjected (-, no ASO control), or 300 g of Cep290 (negative control ASO; Gerard et al, Mol. Ther. Nuc. Ac., 2015), ASO-injected brains. Products corresponding to NMD exon inclusion and full-length can be quantified and the percentage of NMD exon inclusion can be plotted. TaqMan PCR can be performed using two different probes spanning NMD exon junctions and the products can be normalized to GAPDH internal control and fold-change of ASO-injected relative to Cep290-injected brains can be plotted.

### Example 9: Effect on RNA Splicing and Protein Expression by Treatment with Selected ASOs

[0285] In one experiment, ReNcell VM cells were transfected with different exemplary ASOs according to some embodiments of the present disclosure, non-targeting ASO control (“NTC”), or no ASO (“mock control”), in the absence of cycloheximide. RNA was isolated 24 hours after transfection and analyzed for impact on SETD5 mRNA splicing and SETD5 mRNA expression. Briefly, TaqMan qPCR reactions using probes that span Exons 5 and 6 junction (based on the transcript NM_001080517) were conducted to measure productive SETD5 mRNA; TaqMan qPCR reactions using probes that span across NMX Exon 5X only were conducted to measure non-productive SETD5 mRNA that contain Exon 5X and that would be degraded by NMD; TaqMan qPCR reactions using probes that span the Exon 13 and 14 junction (based on the transcript NM_001080517) were conducted to measure total SETD5 mRNA level, including both productive and non-productive SETD5 mRNAs.

[0286] FIG. 12 is a plot that summarizes the relative fold changes in the levels of different SETD5 RNA transcripts in response to the ASO treatment. As shown in the figure, all exemplary ASOs that were tested, including ASO 18 shown in FIG. 5A, and ASO 1, 3, 6, and 7 shown in FIG. 5B, were shown to increase productive SETD5 mRNA transcripts as measured by probes spanning the Exon 5 and 6 junction (“Canonical (5-6)”), as compared to both mock control and NTC, while reducing the level of non-productive SETD5 mRNA transcripts down to almost zero, as measured by probes spanning NMD Exon 5X (“NMD (5X)”). The tested ASOs did not change the total level of SETD5 mRNA transcripts. FIGS. 13A and 13B show SETD5 protein expression level change in response to ASO treatment, as measured by Jess Western blotting. Briefly, ReNcell VM cells were transfected with different exemplary ASOs according to some embodiments of the present disclosure, non-targeting ASO control (“NTC”), or no ASO (“mock control”), in the absence of cycloheximide. 72 hours after transfection the cells were lysed, and the protein lysates were analyzed for impact on SETD5 protein expression by Jess Western blotting. FIG. 13A shows a representative Jess Western blot image of SETD5 protein the different experiment conditions, together with an image of total protein level as a loading control. FIG. 13B is a plot summarizing the fold change in SETD5 protein level as assessed by Jess Western blot and normalized by the total protein level. As shown in the figure, all tested ASOs were shown to increase the protein level of SETD5 in the cells.

### Example 10: Effects on Target Engagement and Gene Expression in HEK293 Cells by Treatment with Selected Exemplary ASOs at Different Concentrations

[0287] HEK293 cells were nucleofected with or allowed to freely uptake different exemplary ASO compounds that are listed in Table 6 according to some embodiments of the present disclosure. The cells were then evaluated at fixed time points (24 hours or 3 days post ASO treatment) to assess the fold difference in the level of target engagement and gene expression by the tested ASOs relative to the mock control or SMN control used in the same conditions. Test ASOs included those that overlapped with splice sites (splice-site ASOs), introns (intronic ASOs), and exons (exonic ASOs) in the SETD5 macrowalk and SETD5 microwalks. All cytosines in tested exemplary ASOs were methylcytosines.

[0288] In one such experiment, HEK293 cells were nucleofected with 1 μM of test ASOs and evaluated 24 hours after nucleofection (FIGS. 15A-15B). SETD5 Exon 5X inclusion percentage and SETD5 gene expression (transcript levels) relative to the mock control are summarized in FIGS. 15A-15B, respectively. “NMD” transcript levels in FIG. 15B indicate the levels of SETD5 transcripts containing NMD Exon 5X, “canonical” transcript levels indicate the levels of SETD5 transcripts that do not include NMD Exon 5X, and “downstream” transcript levels indicate the total level of SETD5 transcripts measured by RT-PCR with probes covering mRNA regions downstream of Exon 5X.

[0289] In another experiment, HEK293 cells were allowed to freely uptake 20 μM of test ASOs and evaluated 3 days after the initiation of ASO exposure (FIGS. 16A-16B). SETD5 Exon 5X inclusion percentage and SETD5 gene expression (transcript levels) relative to the mock control are summarized in FIGS. 16A-16B, respectively. In a similar experiment, HEK293 cells were nucleofected with 0.5 μM of test ASOs and evaluated 24 hours after nucleofection (FIGS. 17A-17B). SETD5 Exon 5X inclusion percentage and SETD5 gene expression (transcript levels) relative to the mock control are summarized in FIGS. 17A-17B, respectively.

[0290] In yet another experiment, HEK293 cells were allowed to freely uptake test ASOs at 10 μM and evaluated 3 days after nucleofection (FIGS. 18A-18B). SETD5 Exon 5X inclusion percentage and SETD5 gene expression (transcript levels) relative to the mock control are summarized in FIGS. 17A-17B, respectively.

[0291] In another experiment, a subset of intronic ASOs generated from an SETD5 microwalk were treated under the same conditions (1 μM of test ASOs and evaluated 24 hours after nucleofection) and the percentage of SETD5 Exon 5X inclusion (FIG. 19A) and fold change in gene expression were assessed (FIG. 19B). FIG. 19A shows a histogram representing the percentage of SETD5 Exon 5X inclusion in HEK293 cells post application of various ASOs relative to mock and SMN-targeting (SMN1 survival of motor neuron 1-targeting) ASO controls. FIG. 19B is a graph representing the fold change of gene expression by various ASOs from the SETD5 microwalk relative to control samples.

[0292] In yet another experiment, a subset of intronic ASOs generated from an SETD5 microwalk were treated under the same conditions (20 μM of test ASOs and evaluated 3 days after the initiation of ASO exposure) and the percentage of SETD5 Exon 5X inclusion (FIG. 20A) and fold change in gene expression were assessed (FIG. 20B). FIG. 20A shows a histogram representing the percentage of SETD5 Exon 5X inclusion in HEK293 cells post application of various ASOs relative to mock and SMN controls. FIG. 20B is a graph representing the fold change of gene expression by various ASOs from the SETD5 microwalk relative to control samples.

[0293] While preferred embodiments of the present disclosure have been shown and described herein, it will be obvious to those skilled in the art that such embodiments are provided by way of example only. Numerous variations, changes, and substitutions will now occur to those skilled in the art without departing from the disclosure. It should be understood that various alternatives to the embodiments of the disclosure described herein may be employed in practicing the disclosure. It is intended that the following claims define the scope of the disclosure and that methods and structures within the scope of these claims and their equivalents be covered thereby.

### EXEMPLARY EMBODIMENTS

[0294] Described herein, in certain embodiments, is a method of modulating expression of a target protein in a cell having a pre-mRNA that is transcribed from a target gene and that comprises a non-sense mediated RNA decay-inducing exon (NMD exon), the method comprising contacting an agent or a vector encoding the agent to the cell, whereby the agent modulates splicing of the NMD exon from the pre-mRNA, thereby modulating the level of a processed mRNA that is processed from the pre-mRNA, and modulating the expression of the target protein in the cell, wherein the target gene is a SETD5 gene.

[0295] Described herein, in certain embodiments, is a method of treating or reducing the likelihood of developing a disease or condition in a subject in need thereof by modulating expression of a target protein in a cell of the subject, comprising: contacting the cell of the subject with an agent or a vector encoding the agent to the cell, whereby the agent modulates splicing of a non-sense mediated mRNA decay-inducing exon (NMD exon) from a pre-mRNA that is transcribed from a target gene and that comprises the NMD exon, thereby modulating the level of a processed mRNA that is processed from the pre-mRNA, and modulating the expression of the target protein in the cell of the subject, wherein the gene is a SETD5 gene.

[0296] In some embodiments, the agent: (a) binds to a targeted portion of the pre-mRNA; (b) modulates binding of a factor involved in splicing of the NMD exon; or (c) a combination of (a) and (b).

[0297] In some embodiments, the agent interferes with binding of the factor involved in splicing of the NMD exon to a region of the targeted portion.

[0298] In some embodiments, the targeted portion of the pre-mRNA is proximal to the NMD exon.

[0299] In some embodiments, the targeted portion of the pre-mRNA is at most about 1500 nucleotides, about 1000 nucleotides, about 800 nucleotides, about 700 nucleotides, about 600 nucleotides, about 500 nucleotides, about 400 nucleotides, about 300 nucleotides, about 200 nucleotides, about 100 nucleotides, about 80 nucleotides, about 70 nucleotides, about 60 nucleotides, about 50 nucleotides upstream of 5′ end of the NMD exon.

[0300] In some embodiments, the targeted portion of the pre-mRNA is at least about 1500 nucleotides, about 1000 nucleotides, about 800 nucleotides, about 700 nucleotides, about 600 nucleotides, about 500 nucleotides, about 400 nucleotides, about 300 nucleotides, about 200 nucleotides, about 100 nucleotides, about 80 nucleotides, about 70 nucleotides, about 60 nucleotides, about 50 nucleotides, about 40 nucleotides, about 30 nucleotides, about 20 nucleotides, about 10 nucleotides, about 5 nucleotides, about 4 nucleotides, about 2 nucleotides, about 1 nucleotides upstream of 5′ end of the NMD exon.

[0301] In some embodiments, the targeted portion of the pre-mRNA is at most about 1500 nucleotides, about 1000 nucleotides, about 800 nucleotides, about 700 nucleotides, about 600 nucleotides, about 500 nucleotides, about 400 nucleotides, about 300 nucleotides, about 200 nucleotides, about 100 nucleotides, about 80 nucleotides, about 70 nucleotides, about 60 nucleotides, about 50 nucleotides downstream of 3′ end of the NMD exon.

[0302] In some embodiments, the targeted portion of the pre-mRNA is at least about 1500 nucleotides, about 1000 nucleotides, about 800 nucleotides, about 700 nucleotides, about 600 nucleotides, about 500 nucleotides, about 400 nucleotides, about 300 nucleotides, about 200 nucleotides, about 100 nucleotides, about 80 nucleotides, about 70 nucleotides, about 60 nucleotides, about 50 nucleotides, about 40 nucleotides, about 30 nucleotides, about 20 nucleotides, about 10 nucleotides, about 5 nucleotides, about 4 nucleotides, about 2 nucleotides, about 1 nucleotides downstream of 3′ end of the NMD exon.

[0303] In some embodiments, the targeted portion of the pre-mRNA is at most about 1500 nucleotides, about 1000 nucleotides, about 800 nucleotides, about 700 nucleotides, about 600 nucleotides, about 500 nucleotides, about 400 nucleotides, about 300 nucleotides, about 200 nucleotides, about 100 nucleotides, about 80 nucleotides, about 70 nucleotides, about 60 nucleotides, about 50 nucleotides upstream of genomic site selected from the group consisting of: GRCh38/hg38: chr3 9429827; GRCh38/hg38: chr3 9433370; GRCh38/hg38: chr3 9434591 and GRCh38/hg38: chr3 9428823 9429009.

[0304] In some embodiments, the targeted portion of the pre-mRNA is about 1500 nucleotides, about 1000 nucleotides, about 800 nucleotides, about 700 nucleotides, about 600 nucleotides, about 500 nucleotides, about 400 nucleotides, about 300 nucleotides, about 200 nucleotides, about 100 nucleotides, about 80 nucleotides, about 70 nucleotides, about 60 nucleotides, about 50 nucleotides upstream of genomic site selected from the group consisting of: GRCh38/hg38: chr3 9429827; GRCh38/hg38: chr3 9433370; GRCh38/hg38: chr3 9434591 and GRCh38/hg38: chr3 9428823 9429009.

[0305] In some embodiments, the targeted portion of the pre-mRNA is at most about 1500 nucleotides, about 1000 nucleotides, about 800 nucleotides, about 700 nucleotides, about 600 nucleotides, about 500 nucleotides, about 400 nucleotides, about 300 nucleotides, about 200 nucleotides, about 100 nucleotides, about 80 nucleotides, about 70 nucleotides, about 60 nucleotides, about 50 nucleotides downstream of genomic site selected from the group consisting of: GRCh38/hg38: chr3 9430051; GRCh38/hg38: chr3 9433562; GRCh38/hg38: chr3 9434630 and GRCh38/hg38: chr3 9428823 9429009.

[0306] In some embodiments, the targeted portion of the pre-mRNA is about 1500 nucleotides, about 1000 nucleotides, about 800 nucleotides, about 700 nucleotides, about 600 nucleotides, about 500 nucleotides, about 400 nucleotides, about 300 nucleotides, about 200 nucleotides, about 100 nucleotides, about 80 nucleotides, about 70 nucleotides, about 60 nucleotides, about 50 nucleotides downstream of genomic site selected from the group consisting of: GRCh38/hg38: chr3 9430051; GRCh38/hg38: chr3 9433562; GRCh38/hg38: chr3 9434630 and GRCh38/hg38: chr3 9428823 9429009.

[0307] In some embodiments, the targeted portion of the pre-mRNA is located in an intronic region between two canonical exonic regions of the pre-mRNA, and wherein the intronic region contains the NMD exon.

[0308] In some embodiments, the targeted portion of the pre-mRNA at least partially overlaps with the NMD exon.

[0309] In some embodiments, targeted portion of the pre-mRNA at least partially overlaps with an intron upstream or downstream of the NMD exon.

[0310] In some embodiments, the targeted portion of the pre-mRNA comprises 5′ NMD exon-intron junction or 3′ NMD exon-intron junction.

[0311] In some embodiments, the targeted portion of the pre-mRNA is within the NMD exon.

[0312] In some embodiments, the targeted portion of the pre-mRNA comprises about 5, 6, 7, 8, 9, 10, 11, 12, 13, 14, 15, 16, 17, 18, 19, 20, 21, 22, 23, 24, 25, 26, 27, 28, 29, 30, or more consecutive nucleotides of the NMD exon.

[0313] In some embodiments, the NMD exon comprises a sequence with at least 80%, at least 90%, or 100% sequence identity to a sequence selected from the group consisting of the sequences listed in Table 2 (e.g., the sequence set forth in any one of SEQ ID NO: 332-339).

[0314] In some embodiments, the NMD exon comprises a sequence selected from the group consisting of the sequences listed in Table 2 (e.g., the sequence set forth in any one of SEQ ID NO: 332-339).

[0315] In some embodiments, the pre-mRNA comprises a sequence with at least about 80%, 85%, 90%, 95%, 97%, or 100% sequence identity to a sequence selected from the group consisting of the sequences listed in Table 2 or Table 3 (e.g., the sequence set forth in any one of SEQ ID NO: 332-403).

[0316] In some embodiments, the pre-mRNA is encoded by a genetic sequence with at least about 80%, 85%, 90%, 95%, 97%, or 100% sequence identity to a sequence selected from the group consisting of the sequences listed in Table 2 or Table 3 (e.g., the sequence set forth in any one of SEQ ID NO: 332-403).

[0317] In some embodiments, the targeted portion of the pre-mRNA comprises a sequence with at least 80%, 85%, 90%, 95%, 97%, or 100% sequence identity to a region comprising at least 8 contiguous nucleic acids of a sequence selected from the group consisting of the sequences listed in Table 2 or Table 3 (e.g., the sequence set forth in any one of SEQ ID NO: 332-403).

[0318] In some embodiments, the agent is an antisense oligomer (ASO) and wherein the ASO comprises a sequence that is at least about 80%, 85%, 90%, 95%, 97%, or 100% complementary to at least 8 contiguous nucleic acids of a sequence selected from the group consisting of the sequences listed in Table 4 (e.g., the sequence set forth in any one of SEQ ID NO: 1-331).

[0319] In some embodiments, the method comprises contacting the vector encoding the agent to the cell, wherein the agent is a polynucleotide comprising an antisense oligomer.

[0320] In some embodiments, the vector is a viral vector.

[0321] In some embodiments, the viral vector is an adeno-associated viral vector.

[0322] In some embodiments, the polynucleotide further comprises a modified snRNA.

[0323] In some embodiments, the modified human snRNA is a modified U1 snRNA or a modified U7 snRNA.

[0324] In some embodiments, the modified human snRNA is a modified U7 snRNA and wherein the antisense oligomer has a sequence at least 75%, at least 80%, at least 85%, at least 90%, at least 95%, at least 98%, at least 99%, or 100% identical to a sequence listed in Table 4 (e.g., the sequence set forth in any one of SEQ ID NO: 1-331).

[0325] In some embodiments, the targeted portion of the pre-mRNA is within the non-sense mediated RNA decay-inducing exon selected from the group consisting of: GRCh38/hg38: chr3 9429827 9430051; GRCh38/hg38: chr3 9433370 9433562; GRCh38/hg38: chr3 9434591 9434630 and GRCh38/hg38: chr3 9428823 9429009.

[0326] In some embodiments, the targeted portion of the pre-mRNA is upstream or downstream of the non-sense mediated RNA decay-inducing exon selected from the group consisting of: GRCh38/hg38: chr3 9429827 9430051; GRCh38/hg38: chr3 9433370 9433562; GRCh38/hg38: chr3 9434591 9434630 and GRCh38/hg38: chr3 9428823 9429009.

[0327] In some embodiments, the targeted portion of the pre-mRNA comprises an exon-intron junction of exon selected from the group consisting of: GRCh38/hg38: chr3 9429827 9430051; GRCh38/hg38: chr3 9433370 9433562; GRCh38/hg38: chr3 9434591 9434630 and GRCh38/hg38: chr3 9428823 9429009.

[0328] In some embodiments, the target protein expressed from the processed mRNA is a full-length protein or a wild-type protein.

[0329] In some embodiments, the target protein expressed from the processed mRNA is at least partially functional as compared to a wild-type SETD5 protein.

[0330] In some embodiments, the target protein expressed from the processed mRNA is at least partially functional as compared to a full-length wild-type SETD5 protein.

[0331] In some embodiments, the agent promotes exclusion of the NMD exon from the processed mRNA.

[0332] In some embodiments, the exclusion of the NMD exon from the processed mRNA in the cell contacted with the agent is increased by about 1.1 to about 10-fold, about 1.5 to about 10-fold, about 2 to about 10-fold, about 3 to about 10-fold, about 4 to about 10-fold, about 1.1 to about 5-fold, about 1.1 to about 6-fold, about 1.1 to about 7-fold, about 1.1 to about 8-fold, about 1.1 to about 9-fold, about 2 to about 5-fold, about 2 to about 6-fold, about 2 to about 7-fold, about 2 to about 8-fold, about 2 to about 9-fold, about 3 to about 6-fold, about 3 to about 7-fold, about 3 to about 8-fold, about 3 to about 9-fold, about 4 to about 7-fold, about 4 to about 8-fold, about 4 to about 9-fold, at least about 1.1-fold, at least about 1.5-fold, at least about 2-fold, at least about 2.5-fold, at least about 3-fold, at least about 3.5-fold, at least about 4-fold, at least about 5-fold, or at least about 10-fold, compared to exclusion of the NMD exon from the processed mRNA in a control cell.

[0333] In some embodiments, the agent increases the level of the processed mRNA in the cell.

[0334] In some embodiments, the level of the processed mRNA in the cell contacted with the agent is increased by about 1.1 to about 10-fold, about 1.5 to about 10-fold, about 2 to about 10-fold, about 3 to about 10-fold, about 4 to about 10-fold, about 1.1 to about 5-fold, about 1.1 to about 6-fold, about 1.1 to about 7-fold, about 1.1 to about 8-fold, about 1.1 to about 9-fold, about 2 to about 5-fold, about 2 to about 6-fold, about 2 to about 7-fold, about 2 to about 8-fold, about 2 to about 9-fold, about 3 to about 6-fold, about 3 to about 7-fold, about 3 to about 8-fold, about 3 to about 9-fold, about 4 to about 7-fold, about 4 to about 8-fold, about 4 to about 9-fold, at least about 1.1-fold, at least about 1.5-fold, at least about 2-fold, at least about 2.5-fold, at least about 3-fold, at least about 3.5-fold, at least about 4-fold, at least about 5-fold, or at least about 10-fold, compared to a level of the processed mRNA in a control cell.

[0335] In some embodiments, the agent increases the expression of the target protein in the cell.

[0336] In some embodiments, a level of the target protein expressed from the processed mRNA in the cell contacted with the agent is increased by about 1.1 to about 10-fold, about 1.5 to about 10-fold, about 2 to about 10-fold, about 3 to about 10-fold, about 4 to about 10-fold, about 1.1 to about 5-fold, about 1.1 to about 6-fold, about 1.1 to about 7-fold, about 1.1 to about 8-fold, about 1.1 to about 9-fold, about 2 to about 5-fold, about 2 to about 6-fold, about 2 to about 7-fold, about 2 to about 8-fold, about 2 to about 9-fold, about 3 to about 6-fold, about 3 to about 7-fold, about 3 to about 8-fold, about 3 to about 9-fold, about 4 to about 7-fold, about 4 to about 8-fold, about 4 to about 9-fold, at least about 1.1-fold, at least about 1.5-fold, at least about 2-fold, at least about 2.5-fold, at least about 3-fold, at least about 3.5-fold, at least about 4-fold, at least about 5-fold, or at least about 10-fold, compared to a level of the target protein produced in a control cell.

[0337] In some embodiments, the disease or condition is induced by a loss-of-function mutation in the target protein.

[0338] In some embodiments, the disease or condition is associated with haploinsufficiency of a gene encoding the target protein, and wherein the subject has a first allele encoding a functional target protein, and a second allele from which the target protein is not produced or produced at a reduced level, or a second allele encoding a nonfunctional target protein or a partially functional target protein.

[0339] In some embodiments, the disease or condition is an intellectual disability or an autism spectrum disease.

[0340] In some embodiments, the disease or condition is selected from the group consisting of: autism; mental retardation; mental retardation, autosomal dominant 23 (mrd23, autosomal dominant non-syndromic intellectual disability 23; autosomal dominant mental retardation 23; intellectual disability-facial dysmorphism syndrome due to setd5 haploinsufficiency; mental retardation, autosomal dominant, type 23); Cornelia De Lange Syndrome (cdls, typus degenerativus amstelodamensis, de lange syndrome, brachmann-de lange syndrome, bdls, brachmann de lange syndrome); alacrima, achalasia, and mental retardation syndrome (aamr, intellectual disability); chromosome 3pter-p25 deletion syndrome (3p-syndrome; 3p deletion syndrome; distal monosomy 3p; chromosome 3p-syndrome; chromosome 3, monosomy 3p25; del syndrome; deletion 3p25; distal 3p deletion; monosomy 3pter; telomeric monosomy 3p; partial monosomy 3p; 3p partial monosomy syndrome; chromo-some 3, deletion 3p; chromosome 3, monosomy 3p; chromosome 3p deletion syndrome; deletion 3p; monosomy 3p; deletion syndrome, chromosome 3pter-p25NK-cell enteropathy); and mental retardation, autosomal dominant 21 (mrd21; autosomal dominant non-syndromic intellectual disability 21; autosomal dominant mental retardation 21; intellectual disability-feeding difficulties-developmental delay-microcephaly syndrome; mental retardation, autosomal dominant, type 21).

[0341] In some embodiments, the disease or condition is associated with an autosomal recessive mutation of a gene encoding the target protein, wherein the subject has a first allele encoding from which: (i) the target protein is not produced or produced at a reduced level compared to a wild-type allele; or (ii) the target protein produced is nonfunctional or partially functional compared to a wild-type allele, and a second allele from which: (iii) the target protein is produced at a reduced level compared to a wild-type allele and the target protein produced is at least partially functional compared to a wild-type allele; or (iv) the target protein produced is partially functional compared to a wild-type allele.

[0342] In some embodiments, the disease or condition is an intellectual disability or an autism spectrum disease.

[0343] In some embodiments, the disease or condition is selected from the group consisting of: autism; mental retardation; mental retardation, autosomal dominant 23 (mrd23, autosomal dominant non-syndromic intellectual disability 23; autosomal dominant mental retardation 23; intellectual disability-facial dysmorphism syndrome due to setd5 haploinsufficiency; mental retardation, autosomal dominant, type 23); Cornelia De Lange Syndrome (cdls, typus degenerativus amstelodamensis, de lange syndrome, brachmann-de lange syndrome, bdls, brachmann de lange syndrome); alacrima, achalasia, and mental retardation syndrome (aamr, intellectual disability); chromosome 3pter-p25 deletion syndrome (3p-syndrome; 3p deletion syndrome; distal monosomy 3p; chromosome 3p-syndrome; chromosome 3, monosomy 3p25; del syndrome; deletion 3p25; distal 3p deletion; monosomy 3pter; telomeric monosomy 3p; partial monosomy 3p; 3p partial monosomy syndrome; chromo-some 3, deletion 3p; chromosome 3, monosomy 3p; chromosome 3p deletion syndrome; deletion 3p; monosomy 3p; deletion syndrome, chromosome 3pter-p25NK-cell enteropathy); and mental retardation, autosomal dominant 21 (mrd21; autosomal dominant non-syndromic intellectual disability 21; autosomal dominant mental retardation 21; intellectual disability-feeding difficulties-developmental delay-microcephaly syndrome; mental retardation, autosomal dominant, type 21).

[0344] In some embodiments, the agent promotes exclusion of the NMD exon from the processed mRNA and increases the expression of the target protein in the cell.

[0345] In some embodiments, the agent inhibits exclusion of the NMD exon from the processed mRNA encoding the target protein.

[0346] In some embodiments, the exclusion of the NMD exon from the processed mRNA in the cell contacted with the agent is decreased by about 1.1 to about 10-fold, about 1.5 to about 10-fold, about 2 to about 10-fold, about 3 to about 10-fold, about 4 to about 10-fold, about 1.1 to about 5-fold, about 1.1 to about 6-fold, about 1.1 to about 7-fold, about 1.1 to about 8-fold, about 1.1 to about 9-fold, about 2 to about 5-fold, about 2 to about 6-fold, about 2 to about 7-fold, about 2 to about 8-fold, about 2 to about 9-fold, about 3 to about 6-fold, about 3 to about 7-fold, about 3 to about 8-fold, about 3 to about 9-fold, about 4 to about 7-fold, about 4 to about 8-fold, about 4 to about 9-fold, at least about 1.1-fold, at least about 1.5-fold, at least about 2-fold, at least about 2.5-fold, at least about 3-fold, at least about 3.5-fold, at least about 4-fold, at least about 5-fold, or at least about 10-fold, compared to exclusion of the NMD exon from the processed mRNA in a control cell.

[0347] In some embodiments, the agent decreases the level of the processed mRNA in the cell.

[0348] In some embodiments, the level of the processed mRNA in the cell contacted with the agent is decreased by about 1.1 to about 10-fold, about 1.5 to about 10-fold, about 2 to about 10-fold, about 3 to about 10-fold, about 4 to about 10-fold, about 1.1 to about 5-fold, about 1.1 to about 6-fold, about 1.1 to about 7-fold, about 1.1 to about 8-fold, about 1.1 to about 9-fold, about 2 to about 5-fold, about 2 to about 6-fold, about 2 to about 7-fold, about 2 to about 8-fold, about 2 to about 9-fold, about 3 to about 6-fold, about 3 to about 7-fold, about 3 to about 8-fold, about 3 to about 9-fold, about 4 to about 7-fold, about 4 to about 8-fold, about 4 to about 9-fold, at least about 1.1-fold, at least about 1.5-fold, at least about 2-fold, at least about 2.5-fold, at least about 3-fold, at least about 3.5-fold, at least about 4-fold, at least about 5-fold, or at least about 10-fold, compared to a level of the processed mRNA in a control cell.

[0349] In some embodiments, the agent decreases the expression of the target protein in the cell.

[0350] In some embodiments, a level of the target protein expressed from the processed mRNA in the cell contacted with the agent is decreased by about 1.1 to about 10-fold, about 1.5 to about 10-fold, about 2 to about 10-fold, about 3 to about 10-fold, about 4 to about 10-fold, about 1.1 to about 5-fold, about 1.1 to about 6-fold, about 1.1 to about 7-fold, about 1.1 to about 8-fold, about 1.1 to about 9-fold, about 2 to about 5-fold, about 2 to about 6-fold, about 2 to about 7-fold, about 2 to about 8-fold, about 2 to about 9-fold, about 3 to about 6-fold, about 3 to about 7-fold, about 3 to about 8-fold, about 3 to about 9-fold, about 4 to about 7-fold, about 4 to about 8-fold, about 4 to about 9-fold, at least about 1.1-fold, at least about 1.5-fold, at least about 2-fold, at least about 2.5-fold, at least about 3-fold, at least about 3.5-fold, at least about 4-fold, at least about 5-fold, or at least about 10-fold, compared to a level of the target protein expressed in a control cell.

[0351] In some embodiments, the disease or condition is induced by a gain-of-function mutation in the target protein.

[0352] In some embodiments, the subject has an allele from which the target protein is produced at an increased level, or an allele encoding a mutant target protein that exhibits increased activity in the cell.

[0353] In some embodiments, the agent inhibits exclusion of the NMD exon from the processed mRNA encoding the target protein and decreases the expression of the target protein in the cell.

[0354] In some embodiments, the agent is an antisense oligomer (ASO) and wherein the antisense oligomer comprises a backbone modification comprising a phosphorothioate linkage or a phosphorodiamidate linkage.

[0355] In some embodiments, the agent is an antisense oligomer (ASO) and wherein the antisense oligomer comprises a phosphorodiamidate morpholino, a locked nucleic acid, a peptide nucleic acid, a 2′-O-methyl, a 2′-Fluoro, a 2′-O-methoxyethyl moiety, or a 2′-NMA moiety.

[0356] In some embodiments, the agent is an antisense oligomer (ASO) and wherein the antisense oligomer comprises at least one modified sugar moiety.

[0357] In some embodiments, each sugar moiety is a modified sugar moiety.

[0358] In some embodiments, the agent is an antisense oligomer (ASO) and wherein the antisense oligomer consists of from 8 to 50 nucleobases, 8 to 40 nucleobases, 8 to 35 nucleobases, 8 to 30 nucleobases, 8 to 25 nucleobases, 8 to 20 nucleobases, 8 to 15 nucleobases, 9 to 50 nucleobases, 9 to 40 nucleobases, 9 to 35 nucleobases, 9 to 30 nucleobases, 9 to 25 nucleobases, 9 to 20 nucleobases, 9 to 15 nucleobases, 10 to 50 nucleobases, 10 to 40 nucleobases, 10 to 35 nucleobases, 10 to 30 nucleobases, 10 to 25 nucleobases, 10 to 20 nucleobases, 10 to 15 nucleobases, 11 to 50 nucleobases, 11 to 40 nucleobases, 11 to 35 nucleobases, 11 to 30 nucleobases, 11 to 25 nucleobases, 11 to 20 nucleobases, 11 to 15 nucleobases, 12 to 50 nucleobases, 12 to 40 nucleobases, 12 to 35 nucleobases, 12 to 30 nucleobases, 12 to 25 nucleobases, 12 to 20 nucleobases, or 12 to 15 nucleobases.

[0359] In some embodiments, the agent is an antisense oligomer (ASO) and wherein the antisense oligomer is at least 80%, at least 85%, at least 90%, at least 95%, at least 98%, at least 99%, or 100%, complementary to the targeted portion of the pre-mRNA.

[0360] In some embodiments, the method further comprises assessing mRNA level or expression level of the target protein.

[0361] In some embodiments, the subject is a human.

[0362] In some embodiments, the subject is a non-human animal.

[0363] In some embodiments, the subject is a fetus, an embryo, or a child.

[0364] In some embodiments, the cells are ex vivo.

[0365] In some embodiments, the agent is administered by intrathecal injection, intracerebroventricular injection, intraperitoneal injection, intramuscular injection, subcutaneous injection, intravitreal, or intravenous injection of the subject.

[0366] In some embodiments, the method further comprises administering a second therapeutic agent to the subject.

[0367] In some embodiments, the second therapeutic agent is a small molecule.

[0368] In some embodiments, the second therapeutic agent is an antisense oligomer.

[0369] In some embodiments, the second therapeutic agent corrects intron retention.

[0370] In some embodiments, the pre-mRNA comprises one or more NMD exons.

[0371] In some embodiments, the pre-mRNA comprises two or more NMD exons.

[0372] In some embodiments, the pre-mRNA comprises three or more NMD exons.

[0373] In some embodiments, splicing of one or more NMD exons from the pre-mRNA are modulated.

[0374] In some embodiments, splicing of two or more NMD exons from the pre-mRNA are modulated.

[0375] In some embodiments, splicing of three or more NMD exons from the pre-mRNA are modulated.

[0376] In some embodiments, the two or more NMD exons are located in a single intron.

[0377] In some embodiments, the two or more NMD exons are located in different introns.

[0378] In some embodiments, the three or more NMD exons are located in a single intron.

[0379] In some embodiments, the three or more NMD exons are located in different introns.

[0380] In some embodiments, the method treats the disease or condition.

[0381] Described herein, in certain embodiments, is a composition comprising an agent or a vector encoding the agent that modulates splicing of a non-sense mediated RNA decay-inducing exon (NMD exon) from a pre-mRNA that is transcribed from a target gene and that comprises the NMD exon, thereby modulating the level of a processed mRNA that is processed from the pre-mRNA, and modulating expression of a target protein in a cell having the pre-mRNA, wherein the target gene is a SETD5 gene.

[0382] Described herein, in certain embodiments, is a composition comprising an agent or a vector encoding the agent that modulates splicing of a non-sense mediated mRNA decay-inducing exon (NMD exon) from a pre-mRNA that is transcribed from a target gene and that comprises the NMD exon, thereby treating a disease or condition in a subject in need thereof by modulating the level of a processed mRNA that is processed from the pre-mRNA, and modulating expression of a target protein in a cell of the subject, wherein the target gene is a SETD5 gene.

[0383] Described herein, in certain embodiments, is a pharmaceutical composition comprising the composition as described herein; and a pharmaceutically acceptable excipient and/or a delivery vehicle.

LENGTHY TABLES
The patent application contains a lengthy table section. A copy of the table is available in electronic form from the USPTO web site (https://seqdata.uspto.gov/docdetail?docId=US20260035694A1). An electronic copy of the table will also be available from the USPTO upon request and payment of the fee set forth in 37 CFR 1.19(b)(3).

The application's sequence listing, which the Patent Office published only in electronic form, follows.

SEQUENCE LISTING (522 sequences)

SEQ ID NO: 1 - DNA, 18 bp, synthetic construct
  source 1..18: mol_type = other DNA
tttttctgcattcttgaa

SEQ ID NO: 2 - DNA, 18 bp, synthetic construct
  source 1..18: mol_type = other DNA
gaatatttttctgcattc

SEQ ID NO: 3 - DNA, 18 bp, synthetic construct
  source 1..18: mol_type = other DNA
ttactgaatatttttctg

SEQ ID NO: 4 - DNA, 18 bp, synthetic construct
  source 1..18: mol_type = other DNA
aaatgttactgaatattt

SEQ ID NO: 5 - DNA, 18 bp, synthetic construct
  source 1..18: mol_type = other DNA
atcttaaatgttactgaa

SEQ ID NO: 6 - DNA, 18 bp, synthetic construct
  source 1..18: mol_type = other DNA
agtttatcttaaatgtta

SEQ ID NO: 7 - DNA, 18 bp, synthetic construct
  source 1..18: mol_type = other DNA
cttcaagtttatcttaaa

SEQ ID NO: 8 - DNA, 18 bp, synthetic construct
  source 1..18: mol_type = other DNA
tagttcttcaagtttatc

SEQ ID NO: 9 - DNA, 18 bp, synthetic construct
  source 1..18: mol_type = other DNA
tcagatagttcttcaagt

SEQ ID NO: 10 - DNA, 18 bp, synthetic construct
  source 1..18: mol_type = other DNA
agttatcagatagttctt

SEQ ID NO: 11 - DNA, 18 bp, synthetic construct
  source 1..18: mol_type = other DNA
tacctagttatcagatag

SEQ ID NO: 12 - DNA, 18 bp, synthetic construct
  source 1..18: mol_type = other DNA
ataaatacctagttatca

SEQ ID NO: 13 - DNA, 18 bp, synthetic construct
  source 1..18: mol_type = other DNA
gtaaaataaatacctagt

SEQ ID NO: 14 - DNA, 18 bp, synthetic construct
  source 1..18: mol_type = other DNA
atctagtaaaataaatac

SEQ ID NO: 15 - DNA, 18 bp, synthetic construct
  source 1..18: mol_type = other DNA
aaaatatctagtaaaata

SEQ ID NO: 16 - DNA, 18 bp, synthetic construct
  source 1..18: mol_type = other DNA
aaaggaaaatatctagta

SEQ ID NO: 17 - DNA, 18 bp, synthetic construct
  source 1..18: mol_type = other DNA
acagaaaaggaaaatatc

SEQ ID NO: 18 - DNA, 18 bp, synthetic construct
  source 1..18: mol_type = other DNA
ctgtaacagaaaaggaaa

SEQ ID NO: 19 - DNA, 18 bp, synthetic construct
  source 1..18: mol_type = other DNA
gaatcctgtaacagaaaa

SEQ ID NO: 20 - DNA, 18 bp, synthetic construct
  source 1..18: mol_type = other DNA
atgaggaatcctgtaaca

SEQ ID NO: 21 - DNA, 18 bp, synthetic construct
  source 1..18: mol_type = other DNA
tggacatgaggaatcctg

SEQ ID NO: 22 - DNA, 18 bp, synthetic construct
  source 1..18: mol_type = other DNA
ttatggacatgaggaatc

SEQ ID NO: 23 - DNA, 18 bp, synthetic construct
  source 1..18: mol_type = other DNA
acatgttatggacatgag

SEQ ID NO: 24 - DNA, 18 bp, synthetic construct
  source 1..18: mol_type = other DNA
atccaacatgttatggac

SEQ ID NO: 25 - DNA, 18 bp, synthetic construct
  source 1..18: mol_type = other DNA
gcctcatccaacatgtta

SEQ ID NO: 26 - DNA, 18 bp, synthetic construct
  source 1..18: mol_type = other DNA
gcagagcctcatccaaca

SEQ ID NO: 27 - DNA, 18 bp, synthetic construct
  source 1..18: mol_type = other DNA
gagctgcagagcctcatc

SEQ ID NO: 28 - DNA, 18 bp, synthetic construct
  source 1..18: mol_type = other DNA
ggggtgagctgcagagcc

SEQ ID NO: 29 - DNA, 18 bp, synthetic construct
  source 1..18: mol_type = other DNA
gagtgggggtgagctgca

SEQ ID NO: 30 - DNA, 18 bp, synthetic construct
  source 1..18: mol_type = other DNA
tctgagagtgggggtgag

SEQ ID NO: 31 - DNA, 18 bp, synthetic construct
  source 1..18: mol_type = other DNA
accactctgagagtgggg

SEQ ID NO: 32 - DNA, 18 bp, synthetic construct
  source 1..18: mol_type = other DNA
gactgaccactctgagag

SEQ ID NO: 33 - DNA, 18 bp, synthetic construct
  source 1..18: mol_type = other DNA
atggagactgaccactct

SEQ ID NO: 34 - DNA, 18 bp, synthetic construct
  source 1..18: mol_type = other DNA
aattaatggagactgacc

SEQ ID NO: 35 - DNA, 18 bp, synthetic construct
  source 1..18: mol_type = other DNA
ggtccaattaatggagac

SEQ ID NO: 36 - DNA, 18 bp, synthetic construct
  source 1..18: mol_type = other DNA
cacggggtccaattaatg

SEQ ID NO: 37 - DNA, 18 bp, synthetic construct
  source 1..18: mol_type = other DNA
gaaatcacggggtccaat

SEQ ID NO: 38 - DNA, 18 bp, synthetic construct
  source 1..18: mol_type = other DNA
gattggaaatcacggggt

SEQ ID NO: 39 - DNA, 18 bp, synthetic construct
  source 1..18: mol_type = other DNA
gcagagattggaaatcac

SEQ ID NO: 40 - DNA, 18 bp, synthetic construct
  source 1..18: mol_type = other DNA
tccaacacagcagagatt

SEQ ID NO: 41 - DNA, 18 bp, synthetic construct
  source 1..18: mol_type = other DNA
tgacgtccaacacagcag

SEQ ID NO: 42 - DNA, 18 bp, synthetic construct
  source 1..18: mol_type = other DNA
gctcatgacgtccaacac

SEQ ID NO: 43 - DNA, 18 bp, synthetic construct
  source 1..18: mol_type = other DNA
gcaatgctcatgacgtcc

SEQ ID NO: 44 - DNA, 18 bp, synthetic construct
  source 1..18: mol_type = other DNA
ggattgcaatgctcatga

SEQ ID NO: 45 - DNA, 18 bp, synthetic construct
  source 1..18: mol_type = other DNA
cagagggattgcaatgct

SEQ ID NO: 46 - DNA, 18 bp, synthetic construct
  source 1..18: mol_type = other DNA
actcccagagggattgca

SEQ ID NO: 47 - DNA, 18 bp, synthetic construct
  source 1..18: mol_type = other DNA
tggtgactcccagaggga

SEQ ID NO: 48 - DNA, 18 bp, synthetic construct
  source 1..18: mol_type = other DNA
tgatgtggtgactcccag

SEQ ID NO: 49 - DNA, 18 bp, synthetic construct
  source 1..18: mol_type = other DNA
gtatctgatgtggtgact

SEQ ID NO: 50 - DNA, 18 bp, synthetic construct
  source 1..18: mol_type = other DNA
aggatgtatctgatgtgg

SEQ ID NO: 51 - DNA, 18 bp, synthetic construct
  source 1..18: mol_type = other DNA
tgagtaggatgtatctga

SEQ ID NO: 52 - DNA, 18 bp, synthetic construct
  source 1..18: mol_type = other DNA
atatctgagtaggatgta

SEQ ID NO: 53 - DNA, 18 bp, synthetic construct
  source 1..18: mol_type = other DNA
cagccatatctgagtagg

SEQ ID NO: 54 - DNA, 18 bp, synthetic construct
  source 1..18: mol_type = other DNA
tccagcagccatatctga

SEQ ID NO: 55 - DNA, 18 bp, synthetic construct
  source 1..18: mol_type = other DNA
tctgatccagcagccata

SEQ ID NO: 56 - DNA, 18 bp, synthetic construct
  source 1..18: mol_type = other DNA
tactctgatccagcagcc

SEQ ID NO: 57 - DNA, 18 bp, synthetic construct
  source 1..18: mol_type = other DNA
gcacttactctgatccag

SEQ ID NO: 58 - DNA, 18 bp, synthetic construct
  source 1..18: mol_type = other DNA
aagtagcacttactctga

SEQ ID NO: 59 - DNA, 18 bp, synthetic construct
  source 1..18: mol_type = other DNA
ctagaaagtagcacttac

SEQ ID NO: 60 - DNA, 18 bp, synthetic construct
  source 1..18: mol_type = other DNA
actacctagaaagtagca

SEQ ID NO: 61 - DNA, 18 bp, synthetic construct
  source 1..18: mol_type = other DNA
tacctactacctagaaag

SEQ ID NO: 62 - DNA, 18 bp, synthetic construct
  source 1..18: mol_type = other DNA
taatgtacctactaccta

SEQ ID NO: 63 - DNA, 18 bp, synthetic construct
  source 1..18: mol_type = other DNA
actgataatgtacctact

SEQ ID NO: 64 - DNA, 18 bp, synthetic construct
  source 1..18: mol_type = other DNA
cacagactgataatgtac

SEQ ID NO: 65 - DNA, 18 bp, synthetic construct
  source 1..18: mol_type = other DNA
ctccacacagactgataa

SEQ ID NO: 66 - DNA, 18 bp, synthetic construct
  source 1..18: mol_type = other DNA
gctgtctccacacagact

SEQ ID NO: 67 - DNA, 18 bp, synthetic construct
  source 1..18: mol_type = other DNA
agaaggctgtctccacac

SEQ ID NO: 68 - DNA, 18 bp, synthetic construct
  source 1..18: mol_type = other DNA
ccataagaaggctgtctc

SEQ ID NO: 69 - DNA, 18 bp, synthetic construct
  source 1..18: mol_type = other DNA
gctatccataagaaggct

SEQ ID NO: 70 - DNA, 18 bp, synthetic construct
  source 1..18: mol_type = other DNA
tattagctatccataaga

SEQ ID NO: 71 - DNA, 18 bp, synthetic construct
  source 1..18: mol_type = other DNA
tatcctattagctatcca

SEQ ID NO: 72 - DNA, 18 bp, synthetic construct
  source 1..18: mol_type = other DNA
catattatcctattagct

SEQ ID NO: 73 - DNA, 18 bp, synthetic construct
  source 1..18: mol_type = other DNA
tactacatattatcctat

SEQ ID NO: 74 - DNA, 18 bp, synthetic construct
  source 1..18: mol_type = other DNA
gaaaatactacatattat

SEQ ID NO: 75 - DNA, 18 bp, synthetic construct
  source 1..18: mol_type = other DNA
gttaagaaaatactacat

SEQ ID NO: 76 - DNA, 18 bp, synthetic construct
  source 1..18: mol_type = other DNA
atctggttaagaaaatac

SEQ ID NO: 77 - DNA, 18 bp, synthetic construct
  source 1..18: mol_type = other DNA
agagtaataatttctcat

SEQ ID NO: 78 - DNA, 18 bp, synthetic construct
  source 1..18: mol_type = other DNA
atattagagtaataattt

SEQ ID NO: 79 - DNA, 18 bp, synthetic construct
  source 1..18: mol_type = other DNA
ttcaaatattagagtaat

SEQ ID NO: 80 - DNA, 18 bp, synthetic construct
  source 1..18: mol_type = other DNA
cacctttcaaatattaga

SEQ ID NO: 81 - DNA, 18 bp, synthetic construct
  source 1..18: mol_type = other DNA
cccaacacctttcaaata

SEQ ID NO: 82 - DNA, 18 bp, synthetic construct
  source 1..18: mol_type = other DNA
gaacccccaacacctttc

SEQ ID NO: 83 - DNA, 18 bp, synthetic construct
  source 1..18: mol_type = other DNA
ttgatgaacccccaacac

SEQ ID NO: 84 - DNA, 18 bp, synthetic construct
  source 1..18: mol_type = other DNA
tcatcttgatgaaccccc

SEQ ID NO: 85 - DNA, 18 bp, synthetic construct
  source 1..18: mol_type = other DNA
acctctcatcttgatgaa

SEQ ID NO: 86 - DNA, 18 bp, synthetic construct
  source 1..18: mol_type = other DNA
atcatacctctcatcttg

SEQ ID NO: 87 - DNA, 18 bp, synthetic construct
  source 1..18: mol_type = other DNA
tatttatcatacctctca

SEQ ID NO: 88 - DNA, 18 bp, synthetic construct
  source 1..18: mol_type = other DNA
tcttatatttatcatacc

SEQ ID NO: 89 - DNA, 18 bp, synthetic construct
  source 1..18: mol_type = other DNA
tggcatcttatatttatc

SEQ ID NO: 90 - DNA, 18 bp, synthetic construct
  source 1..18: mol_type = other DNA
aacaatggcatcttatat

SEQ ID NO: 91 - DNA, 18 bp, synthetic construct
  source 1..18: mol_type = other DNA
gtaaaaacaatggcatct

SEQ ID NO: 92 - DNA, 18 bp, synthetic construct
  source 1..18: mol_type = other DNA
tacaggtaaaaacaatgg

SEQ ID NO: 93 - DNA, 18 bp, synthetic construct
  source 1..18: mol_type = other DNA
gaaagtacaggtaaaaac

SEQ ID NO: 94 - DNA, 18 bp, synthetic construct
  source 1..18: mol_type = other DNA
ctgaagaaagtacaggta

SEQ ID NO: 95 - DNA, 18 bp, synthetic construct
  source 1..18: mol_type = other DNA
ataccctgaagaaagtac

SEQ ID NO: 96 - DNA, 18 bp, synthetic construct
  source 1..18: mol_type = other DNA
acaggataccctgaagaa

SEQ ID NO: 97 - DNA, 18 bp, synthetic construct
  source 1..18: mol_type = other DNA
ccaagacaggataccctg

SEQ ID NO: 98 - DNA, 18 bp, synthetic construct
  source 1..18: mol_type = other DNA
ctaccaagacaggatacc

SEQ ID NO: 99 - DNA, 18 bp, synthetic construct
  source 1..18: mol_type = other DNA
attcactaccaagacagg

SEQ ID NO: 100 - DNA, 18 bp, synthetic construct
  source 1..18: mol_type = other DNA
cttccattcactaccaag

SEQ ID NO: 101 - DNA, 18 bp, synthetic construct
  source 1..18: mol_type = other DNA
gccctcttccattcacta

SEQ ID NO: 102 - DNA, 18 bp, synthetic construct
  source 1..18: mol_type = other DNA
accaggccctcttccatt

SEQ ID NO: 103 - DNA, 18 bp, synthetic construct
  source 1..18: mol_type = other DNA
cagggaccaggccctctt

SEQ ID NO: 104 - DNA, 18 bp, synthetic construct
  source 1..18: mol_type = other DNA
tgccccagggaccaggcc

SEQ ID NO: 105 - DNA, 18 bp, synthetic construct
  source 1..18: mol_type = other DNA
tgcactgccccagggacc

SEQ ID NO: 106 - DNA, 18 bp, synthetic construct
  source 1..18: mol_type = other DNA
ccttctgcactgccccag

SEQ ID NO: 107 - DNA, 18 bp, synthetic construct
  source 1..18: mol_type = other DNA
aagtgccttctgcactgc

SEQ ID NO: 108 - DNA, 18 bp, synthetic construct
  source 1..18: mol_type = other DNA
gatcaaagtgccttctgc

SEQ ID NO: 109 - DNA, 18 bp, synthetic construct
  source 1..18: mol_type = other DNA
gagatgatcaaagtgcct

SEQ ID NO: 110 - DNA, 18 bp, synthetic construct
  source 1..18: mol_type = other DNA
tgagtgagatgatcaaag

SEQ ID NO: 111 - DNA, 18 bp, synthetic construct
  source 1..18: mol_type = other DNA
tgcagtgagtgagatgat

SEQ ID NO: 112 - DNA, 18 bp, synthetic construct
  source 1..18: mol_type = other DNA
acatttgcagtgagtgag

SEQ ID NO: 113 - DNA, 18 bp, synthetic construct
  source 1..18: mol_type = other DNA
acatgacatttgcagtga

SEQ ID NO: 114 - DNA, 18 bp, synthetic construct
  source 1..18: mol_type = other DNA
acctcacatgacatttgc

SEQ ID NO: 115 - DNA, 18 bp, synthetic construct
  source 1..18: mol_type = other DNA
atgaaacctcacatgaca

SEQ ID NO: 116 - DNA, 18 bp, synthetic construct
  source 1..18: mol_type = other DNA
cttccatgaaacctcaca

SEQ ID NO: 117 - DNA, 18 bp, synthetic construct
  source 1..18: mol_type = other DNA
taatacttccatgaaacc

SEQ ID NO: 118 - DNA, 18 bp, synthetic construct
  source 1..18: mol_type = other DNA
tctcttaatacttccatg

SEQ ID NO: 119 - DNA, 18 bp, synthetic construct
  source 1..18: mol_type = other DNA
ttggatctcttaatactt

SEQ ID NO: 120 - DNA, 18 bp, synthetic construct
  source 1..18: mol_type = other DNA
cttaattggatctcttaa

SEQ ID NO: 121 - DNA, 18 bp, synthetic construct
  source 1..18: mol_type = other DNA
ttcttcttaattggatct

SEQ ID NO: 122 - DNA, 18 bp, synthetic construct
  source 1..18: mol_type = other DNA
aactattcttcttaattg

SEQ ID NO: 123 - DNA, 18 bp, synthetic construct
  source 1..18: mol_type = other DNA
ctcagaactattcttctt

SEQ ID NO: 124 - DNA, 18 bp, synthetic construct
  source 1..18: mol_type = other DNA
ttagactcagaactattc

SEQ ID NO: 125 - DNA, 18 bp, synthetic construct
  source 1..18: mol_type = other DNA
ctggtttagactcagaac

SEQ ID NO: 126 - DNA, 18 bp, synthetic construct
  source 1..18: mol_type = other DNA
ctgggctggtttagactc

SEQ ID NO: 127 - DNA, 18 bp, synthetic construct
  source 1..18: mol_type = other DNA
ccactctgggctggttta

SEQ ID NO: 128 - DNA, 18 bp, synthetic construct
  source 1..18: mol_type = other DNA
agaagccactctgggctg

SEQ ID NO: 129 - DNA, 18 bp, synthetic construct
  source 1..18: mol_type = other DNA
cctagagaagccactctg

SEQ ID NO: 130 - DNA, 18 bp, synthetic construct
  source 1..18: mol_type = other DNA
tttcccctagagaagcca

SEQ ID NO: 131 - DNA, 18 bp, synthetic construct
  source 1..18: mol_type = other DNA
gggagtttcccctagaga

SEQ ID NO: 132 - DNA, 18 bp, synthetic construct
  source 1..18: mol_type = other DNA
gagcggggagtttcccct

SEQ ID NO: 133 - DNA, 18 bp, synthetic construct
  source 1..18: mol_type = other DNA
cagctgagcggggagttt

SEQ ID NO: 134 - DNA, 18 bp, synthetic construct
  source 1..18: mol_type = other DNA
taccagctgagcggggag

SEQ ID NO: 135 - DNA, 18 bp, synthetic construct
  source 1..18: mol_type = other DNA
aaacgtaccagctgagcg

SEQ ID NO: 136 - DNA, 18 bp, synthetic construct
  source 1..18: mol_type = other DNA
aacacaaacgtaccagct

SEQ ID NO: 137 - DNA, 18 bp, synthetic construct
  source 1..18: mol_type = other DNA
tgacaaacacaaacgtac

SEQ ID NO: 138 - DNA, 18 bp, synthetic construct
  source 1..18: mol_type = other DNA
cctaatgacaaacacaaa

SEQ ID NO: 139 - DNA, 18 bp, synthetic construct
  source 1..18: mol_type = other DNA
gtgtccctaatgacaaac

SEQ ID NO: 140 - DNA, 18 bp, synthetic construct
  source 1..18: mol_type = other DNA
acaaggtgtccctaatga

SEQ ID NO: 141 - DNA, 18 bp, synthetic construct
  source 1..18: mol_type = other DNA
gagatacaaggtgtccct

SEQ ID NO: 142 - DNA, 18 bp, synthetic construct
  source 1..18: mol_type = other DNA
cacctgagatacaaggtg

SEQ ID NO: 143 - DNA, 18 bp, synthetic construct
  source 1..18: mol_type = other DNA
gcaggcacctgagataca

SEQ ID NO: 144 - DNA, 18 bp, synthetic construct
  source 1..18: mol_type = other DNA
tgaaggcaggcacctgag

SEQ ID NO: 145 - DNA, 18 bp, synthetic construct
  source 1..18: mol_type = other DNA
atgtctgaaggcaggcac

SEQ ID NO: 146 - DNA, 18 bp, synthetic construct
  source 1..18: mol_type = other DNA
ggcagatgtctgaaggca

SEQ ID NO: 147 - DNA, 18 bp, synthetic construct
  source 1..18: mol_type = other DNA
gtacaggcagatgtctga

SEQ ID NO: 148 - DNA, 18 bp, synthetic construct
  source 1..18: mol_type = other DNA
agccagtacaggcagatg

SEQ ID NO: 149 - DNA, 18 bp, synthetic construct
  source 1..18: mol_type = other DNA
catgaagccagtacaggc

SEQ ID NO: 150 - DNA, 18 bp, synthetic construct
  source 1..18: mol_type = other DNA
tgtaacatgaagccagta

SEQ ID NO: 151 - DNA, 18 bp, synthetic construct
  source 1..18: mol_type = other DNA
ttgtgtgtaacatgaagc

SEQ ID NO: 152 - DNA, 18 bp, synthetic construct
  source 1..18: mol_type = other DNA
tggatttgtgtgtaacat

SEQ ID NO: 153 - DNA, 18 bp, synthetic construct
  source 1..18: mol_type = other DNA
aaatgtggatttgtgtgt

SEQ ID NO: 154 - DNA, 18 bp, synthetic construct
  source 1..18: mol_type = other DNA
ttattaaatgtggatttg

SEQ ID NO: 155 - DNA, 18 bp, synthetic construct
  source 1..18: mol_type = other DNA
agagaagggatacaaaag

SEQ ID NO: 156 - DNA, 18 bp, synthetic construct
  source 1..18: mol_type = other DNA
ttaaaagagaagggatac

SEQ ID NO: 157 - DNA, 18 bp, synthetic construct
  source 1..18: mol_type = other DNA
acaacttaaaagagaagg

SEQ ID NO: 158 - DNA, 18 bp, synthetic construct
  source 1..18: mol_type = other DNA
ctcggacaacttaaaaga

SEQ ID NO: 159 - DNA, 18 bp, synthetic construct
  source 1..18: mol_type = other DNA
ggaatctcggacaactta

SEQ ID NO: 160 - DNA, 18 bp, synthetic construct
  source 1..18: mol_type = other DNA
cagggggaatctcggaca

SEQ ID NO: 161 - DNA, 18 bp, synthetic construct
  source 1..18: mol_type = other DNA
gtgagcagggggaatctc

SEQ ID NO: 162 - DNA, 18 bp, synthetic construct
  source 1..18: mol_type = other DNA
aatctgtgagcaggggga

SEQ ID NO: 163 - DNA, 18 bp, synthetic construct
  source 1..18: mol_type = other DNA
gggggaatctgtgagcag

SEQ ID NO: 164 - DNA, 18 bp, synthetic construct
  source 1..18: mol_type = other DNA
caagagggggaatctgtg

SEQ ID NO: 165 - DNA, 18 bp, synthetic construct
  source 1..18: mol_type = other DNA
aaggacaagagggggaat

SEQ ID NO: 166 - DNA, 18 bp, synthetic construct
  source 1..18: mol_type = other DNA
ggtaaaaggacaagaggg

SEQ ID NO: 167 - DNA, 18 bp, synthetic construct
  source 1..18: mol_type = other DNA
agggaggtaaaaggacaa

SEQ ID NO: 168 - DNA, 18 bp, synthetic construct
  source 1..18: mol_type = other DNA
gtacaagggaggtaaaag

SEQ ID NO: 169 - DNA, 18 bp, synthetic construct
  source 1..18: mol_type = other DNA
attgggtacaagggaggt

SEQ ID NO: 170 - DNA, 18 bp, synthetic construct
  source 1..18: mol_type = other DNA
ggaagattgggtacaagg

SEQ ID NO: 171 - DNA, 18 bp, synthetic construct
  source 1..18: mol_type = other DNA
agcaaggaagattgggta

SEQ ID NO: 172 - DNA, 18 bp, synthetic construct
  source 1..18: mol_type = other DNA
ctgtaagcaaggaagatt

SEQ ID NO: 173 - DNA, 18 bp, synthetic construct
  source 1..18: mol_type = other DNA
cctttctgtaagcaagga

SEQ ID NO: 174 - DNA, 18 bp, synthetic construct
  source 1..18: mol_type = other DNA
cacttcctttctgtaagc

SEQ ID NO: 175 - DNA, 18 bp, synthetic construct
  source 1..18: mol_type = other DNA
gcttccacttcctttctg

SEQ ID NO: 176 - DNA, 18 bp, synthetic construct
  source 1..18: mol_type = other DNA
ggggcttccacttccttt

SEQ ID NO: 177 - DNA, 18 bp, synthetic construct
  source 1..18: mol_type = other DNA
ggtagggggcttccactt

SEQ ID NO: 178 - DNA, 18 bp, synthetic construct
  source 1..18: mol_type = other DNA
tgaaaggtagggggcttc

SEQ ID NO: 179 - DNA, 18 bp, synthetic construct
  source 1..18: mol_type = other DNA
cgtcttgaaaggtagggg

SEQ ID NO: 180 - DNA, 18 bp, synthetic construct
  source 1..18: mol_type = other DNA
cacttcgtcttgaaaggt

SEQ ID NO: 181 - DNA, 18 bp, synthetic construct
  source 1..18: mol_type = other DNA
agtgccacttcgtcttga

SEQ ID NO: 182 - DNA, 18 bp, synthetic construct
  source 1..18: mol_type = other DNA
ggtgtagtgccacttcgt

SEQ ID NO: 183 - DNA, 18 bp, synthetic construct
  source 1..18: mol_type = other DNA
atcctggtgtagtgccac

SEQ ID NO: 184 - DNA, 18 bp, synthetic construct
  source 1..18: mol_type = other DNA
ttcacatcctggtgtagt

SEQ ID NO: 185 - DNA, 18 bp, synthetic construct
  source 1..18: mol_type = other DNA
ggactttcacatcctggt

SEQ ID NO: 186 - DNA, 18 bp, synthetic construct
  source 1..18: mol_type = other DNA
tcgctggactttcacatc

SEQ ID NO: 187 - DNA, 18 bp, synthetic construct
  source 1..18: mol_type = other DNA
ctctttcgctggactttc

SEQ ID NO: 188 - DNA, 18 bp, synthetic construct
  source 1..18: mol_type = other DNA
tgggtctctttcgctgga

SEQ ID NO: 189 - DNA, 18 bp, synthetic construct
  source 1..18: mol_type = other DNA
ccccttgggtctctttcg

SEQ ID NO: 190 - DNA, 18 bp, synthetic construct
  source 1..18: mol_type = other DNA
ctaggccccttgggtctc

SEQ ID NO: 191 - DNA, 18 bp, synthetic construct
  source 1..18: mol_type = other DNA
gccccctaggccccttgg

SEQ ID NO: 192 - DNA, 18 bp, synthetic construct
  source 1..18: mol_type = other DNA
gtgctgccccctaggccc

SEQ ID NO: 193 - DNA, 18 bp, synthetic construct
  source 1..18: mol_type = other DNA
ggggtgtgctgcccccta

SEQ ID NO: 194 - DNA, 18 bp, synthetic construct
  source 1..18: mol_type = other DNA
ttctgggggtgtgctgcc

SEQ ID NO: 195 - DNA, 18 bp, synthetic construct
  source 1..18: mol_type = other DNA
ttggcttctgggggtgtg

SEQ ID NO: 196 - DNA, 18 bp, synthetic construct
  source 1..18: mol_type = other DNA
tagacttggcttctgggg

SEQ ID NO: 197 - DNA, 18 bp, synthetic construct
  source 1..18: mol_type = other DNA
tggaatagacttggcttc

SEQ ID NO: 198 - DNA, 18 bp, synthetic construct
  source 1..18: mol_type = other DNA
tactgcctggaatagact

SEQ ID NO: 199 - DNA, 18 bp, synthetic construct
  source 1..18: mol_type = other DNA
cctggtactgcctggaat

SEQ ID NO: 200 - DNA, 18 bp, synthetic construct
  source 1..18: mol_type = other DNA
taatccctggtactgcct

SEQ ID NO: 201 - DNA, 18 bp, synthetic construct
  source 1..18: mol_type = other DNA
gaccctaatccctggtac

SEQ ID NO: 202 - DNA, 18 bp, synthetic construct
  source 1..18: mol_type = other DNA
gcccagaccctaatccct

SEQ ID NO: 203 - DNA, 18 bp, synthetic construct
  source 1..18: mol_type = other DNA
ttccagcccagaccctaa

SEQ ID NO: 204 - DNA, 18 bp, synthetic construct
  source 1..18: mol_type = other DNA
gatttttccagcccagac

SEQ ID NO: 205 - DNA, 18 bp, synthetic construct
  source 1..18: mol_type = other DNA
accaggatttttccagcc

SEQ ID NO: 206 - DNA, 18 bp, synthetic construct
  source 1..18: mol_type = other DNA
aaaacaccaggatttttc

SEQ ID NO: 207 - DNA, 18 bp, synthetic construct
  source 1..18: mol_type = other DNA
tattcaaaacaccaggat

SEQ ID NO: 208 - DNA, 18 bp, synthetic construct
  source 1..18: mol_type = other DNA
gaacatattcaaaacacc

SEQ ID NO: 209 - DNA, 18 bp, synthetic construct
  source 1..18: mol_type = other DNA
gacctgaacatattcaaa

SEQ ID NO: 210 - DNA, 18 bp, synthetic construct
  source 1..18: mol_type = other DNA
aactggacctgaacatat

SEQ ID NO: 211 - DNA, 18 bp, synthetic construct
  source 1..18: mol_type = other DNA
gtctgaactggacctgaa

SEQ ID NO: 212 - DNA, 18 bp, synthetic construct
  source 1..18: mol_type = other DNA
caagagtctgaactggac

SEQ ID NO: 213 - DNA, 18 bp, synthetic construct
  source 1..18: mol_type = other DNA
gggatcaagagtctgaac

SEQ ID NO: 214 - DNA, 18 bp, synthetic construct
  source 1..18: mol_type = other DNA
gctgtgggatcaagagtc

SEQ ID NO: 215 - DNA, 18 bp, synthetic construct
  source 1..18: mol_type = other DNA
aagtggctgtgggatcaa

SEQ ID NO: 216 - DNA, 18 bp, synthetic construct
  source 1..18: mol_type = other DNA
tcaagaagtggctgtggg

SEQ ID NO: 217 - DNA, 18 bp, synthetic construct
  source 1..18: mol_type = other DNA
ctcactcaagaagtggct

SEQ ID NO: 218 - DNA, 18 bp, synthetic construct
  source 1..18: mol_type = other DNA
cacctcactcaagaagtg

SEQ ID NO: 219 - DNA, 18 bp, synthetic construct
  source 1..18: mol_type = other DNA
acacccacctcactcaag

SEQ ID NO: 220 - DNA, 18 bp, synthetic construct
  source 1..18: mol_type = other DNA
gagcaacacccacctcac

SEQ ID NO: 221 - DNA, 18 bp, synthetic construct
  source 1..18: mol_type = other DNA
aattagagcaacacccac

SEQ ID NO: 222 - DNA, 18 bp, synthetic construct
  source 1..18: mol_type = other DNA
aggggaattagagcaaca

SEQ ID NO: 223 - DNA, 18 bp, synthetic construct
  source 1..18: mol_type = other DNA
gaaacaggggaattagag

SEQ ID NO: 224 - DNA, 18 bp, synthetic construct
  source 1..18: mol_type = other DNA
caagagaaacaggggaat

SEQ ID NO: 225 - DNA, 18 bp, synthetic construct
  source 1..18: mol_type = other DNA
aatggcaagagaaacagg

SEQ ID NO: 226 - DNA, 18 bp, synthetic construct
  source 1..18: mol_type = other DNA
gtgaaaatggcaagagaa

SEQ ID NO: 227 - DNA, 18 bp, synthetic construct
  source 1..18: mol_type = other DNA
ggactgtgaaaatggcaa

SEQ ID NO: 228 - DNA, 18 bp, synthetic construct
  source 1..18: mol_type = other DNA
cccagggactgtgaaaat

SEQ ID NO: 229 - DNA, 18 bp, synthetic construct
  source 1..18: mol_type = other DNA
gaatccccagggactgtg

SEQ ID NO: 230 - DNA, 18 bp, synthetic construct
  source 1..18: mol_type = other DNA
gggaagaatccccaggga

SEQ ID NO: 231 - DNA, 18 bp, synthetic construct
  source 1..18: mol_type = other DNA
gaagggggaagaatcccc

SEQ ID NO: 232 - DNA, 18 bp, synthetic construct
  source 1..18: mol_type = other DNA
ttgctgaagggggaagaa

SEQ ID NO: 233 - DNA, 18 bp, synthetic construct
  source 1..18: mol_type = other DNA
ttgctttgctgaaggggg

SEQ ID NO: 234 - DNA, 18 bp, synthetic construct
  source 1..18: mol_type = other DNA
ttgctttgctttgctgaa

SEQ ID NO: 235 - DNA, 18 bp, synthetic construct
  source 1..18: mol_type = other DNA
tacagttgctttgctttg

SEQ ID NO: 236 - DNA, 18 bp, synthetic construct
  source 1..18: mol_type = other DNA
tctggtacagttgctttg

SEQ ID NO: 237 - DNA, 18 bp, synthetic construct
  source 1..18: mol_type = other DNA
agaaatctggtacagttg

SEQ ID NO: 238 - DNA, 18 bp, synthetic construct
  source 1..18: mol_type = other DNA
aacccagaaatctggtac

SEQ ID NO: 239 - DNA, 18 bp, synthetic construct
  source 1..18: mol_type = other DNA
agatggaacaggatctta

SEQ ID NO: 240 - DNA, 18 bp, synthetic construct
  source 1..18: mol_type = other DNA
aatttagatggaacagga

SEQ ID NO: 241 - DNA, 18 bp, synthetic construct
  source 1..18: mol_type = other DNA
acttaaatttagatggaa

SEQ ID NO: 242 - DNA, 18 bp, synthetic construct
  source 1..18: mol_type = other DNA
cccagacttaaatttaga

SEQ ID NO: 243 - DNA, 18 bp, synthetic construct
  source 1..18: mol_type = other DNA
agcaacccagacttaaat

SEQ ID NO: 244 - DNA, 18 bp, synthetic construct
  source 1..18: mol_type = other DNA
atcccagcaacccagact

SEQ ID NO: 245 - DNA, 18 bp, synthetic construct
  source 1..18: mol_type = other DNA
ccctaatcccagcaaccc

SEQ ID NO: 246 - DNA, 18 bp, synthetic construct
  source 1..18: mol_type = other DNA
agaaaccctaatcccagc

SEQ ID NO: 247 - DNA, 18 bp, synthetic construct
  source 1..18: mol_type = other DNA
ttgtaagaaaccctaatc

SEQ ID NO: 248 - DNA, 18 bp, synthetic construct
  source 1..18: mol_type = other DNA
cctacttgtaagaaaccc

SEQ ID NO: 249 - DNA, 18 bp, synthetic construct
  source 1..18: mol_type = other DNA
ttttccctacttgtaaga

SEQ ID NO: 250 - DNA, 18 bp, synthetic construct
  source 1..18: mol_type = other DNA
tgagcttttccctacttg

SEQ ID NO: 251 - DNA, 18 bp, synthetic construct
  source 1..18: mol_type = other DNA
tactttgagcttttccct

SEQ ID NO: 252 - DNA, 18 bp, synthetic construct
  source 1..18: mol_type = other DNA
aagaatactttgagcttt

SEQ ID NO: 253 - DNA, 18 bp, synthetic construct
  source 1..18: mol_type = other DNA
caagaaagaatactttga

SEQ ID NO: 254 - DNA, 18 bp, synthetic construct
  source 1..18: mol_type = other DNA
aaacacaagaaagaatac

SEQ ID NO: 255 - DNA, 18 bp, synthetic construct
  source 1..18: mol_type = other DNA
ttaacaaacacaagaaag

SEQ ID NO: 256 - DNA, 18 bp, synthetic construct
  source 1..18: mol_type = other DNA
ctacattaacaaacacaa

SEQ ID NO: 257 - DNA, 18 bp, synthetic construct
  source 1..18: mol_type = other DNA
atcatctacattaacaaa

SEQ ID NO: 258 - DNA, 18 bp, synthetic construct
  source 1..18: mol_type = other DNA
aaggaatcatctacatta

SEQ ID NO: 259 - DNA, 18 bp, synthetic construct
  source 1..18: mol_type = other DNA
gcactaaggaatcatcta

SEQ ID NO: 260 - DNA, 18 bp, synthetic construct
  source 1..18: mol_type = other DNA
ggagcactaaggaatcat

SEQ ID NO: 261 - DNA, 18 bp, synthetic construct
  source 1..18: mol_type = other DNA
gccaaggagcactaagga

SEQ ID NO: 262 - DNA, 18 bp, synthetic construct
  source 1..18: mol_type = other DNA
ttcgagccaaggagcact

SEQ ID NO: 263 - DNA, 18 bp, synthetic construct
  source 1..18: mol_type = other DNA
gagaattcgagccaagga

SEQ ID NO: 264 - DNA, 18 bp, synthetic construct
  source 1..18: mol_type = other DNA
ctagtgcagagaattcga

SEQ ID NO: 265 - DNA, 18 bp, synthetic construct
  source 1..18: mol_type = other DNA
cacctagtgcagagaatt

SEQ ID NO: 266 - DNA, 18 bp, synthetic construct
  source 1..18: mol_type = other DNA
attctcacctagtgcaga

SEQ ID NO: 267 - DNA, 18 bp, synthetic construct
  source 1..18: mol_type = other DNA
cagcaattctcacctagt

SEQ ID NO: 268 - DNA, 18 bp, synthetic construct
  source 1..18: mol_type = other DNA
gttgtcagcaattctcac

SEQ ID NO: 269 - DNA, 18 bp, synthetic construct
  source 1..18: mol_type = other DNA
tccttgttgtcagcaatt

SEQ ID NO: 270 - DNA, 18 bp, synthetic construct
  source 1..18: mol_type = other DNA
ctcattccttgttgtcag

SEQ ID NO: 271 - DNA, 18 bp, synthetic construct
  source 1..18: mol_type = other DNA
aatctctcattccttgtt

SEQ ID NO: 272 - DNA, 18 bp, synthetic construct
  source 1..18: mol_type = other DNA
acatcaatctctcattcc

SEQ ID NO: 273 - DNA, 18 bp, synthetic construct
  source 1..18: mol_type = other DNA
ctttaacatcaatctctc

SEQ ID NO: 274 - DNA, 18 bp, synthetic construct
  source 1..18: mol_type = other DNA
aatagctttaacatcaat

SEQ ID NO: 275 - DNA, 18 bp, synthetic construct
  source 1..18: mol_type = other DNA
aattcaatagctttaaca

SEQ ID NO: 276 - DNA, 18 bp, synthetic construct
  source 1..18: mol_type = other DNA
tatcaaattcaatagctt

SEQ ID NO: 277 - DNA, 18 bp, synthetic construct
  source 1..18: mol_type = other DNA
tttcatatcaaattcaat

SEQ ID NO: 278 - DNA, 18 bp, synthetic construct
  source 1..18: mol_type = other DNA
ttaaatttcatatcaaat

SEQ ID NO: 279 - DNA, 18 bp, synthetic construct
  source 1..18: mol_type = other DNA
ggacattaaatttcatat

SEQ ID NO: 280 - DNA, 18 bp, synthetic construct
  source 1..18: mol_type = other DNA
ttccaggacattaaattt

SEQ ID NO: 281 - DNA, 18 bp, synthetic construct
  source 1..18: mol_type = other DNA
aatgtttccaggacatta

SEQ ID NO: 282 - DNA, 18 bp, synthetic construct
  source 1..18: mol_type = other DNA
taccaaatgtttccagga

SEQ ID NO: 283 - DNA, 18 bp, synthetic construct
  source 1..18: mol_type = other DNA
ccacctaccaaatgtttc

SEQ ID NO: 284 - DNA, 18 bp, synthetic construct
  source 1..18: mol_type = other DNA
ccctcccacctaccaaat

SEQ ID NO: 285 - DNA, 18 bp, synthetic construct
  source 1..18: mol_type = other DNA
cccctccctcccacctac

SEQ ID NO: 286 - DNA, 18 bp, synthetic construct
  source 1..18: mol_type = other DNA
attaacaaacacaagaaa

SEQ ID NO: 287 - DNA, 18 bp, synthetic construct
  source 1..18: mol_type = other DNA
cattaacaaacacaagaa

SEQ ID NO: 288 - DNA, 18 bp, synthetic construct
  source 1..18: mol_type = other DNA
acattaacaaacacaaga

SEQ ID NO: 289 - DNA, 18 bp, synthetic construct
  source 1..18: mol_type = other DNA
tacattaacaaacacaag

SEQ ID NO: 290 - DNA, 18 bp, synthetic construct
  source 1..18: mol_type = other DNA
tctacattaacaaacaca

SEQ ID NO: 291 - DNA, 18 bp, synthetic construct
  source 1..18: mol_type = other DNA
atctacattaacaaacac

SEQ ID NO: 292 - DNA, 18 bp, synthetic construct
  source 1..18: mol_type = other DNA
catctacattaacaaaca

SEQ ID NO: 293 - DNA, 18 bp, synthetic construct
  source 1..18: mol_type = other DNA
tcatctacattaacaaac

SEQ ID NO: 294 - DNA, 18 bp, synthetic construct
  source 1..18: mol_type = other DNA
aatcatctacattaacaa

SEQ ID NO: 295 - DNA, 18 bp, synthetic construct
  source 1..18: mol_type = other DNA
gaatcatctacattaaca

SEQ ID NO: 296 - DNA, 18 bp, synthetic construct
  source 1..18: mol_type = other DNA
ggaatcatctacattaac

SEQ ID NO: 297 - DNA, 18 bp, synthetic construct
  source 1..18: mol_type = other DNA
aggaatcatctacattaa

SEQ ID NO: 298 - DNA, 18 bp, synthetic construct
  source 1..18: mol_type = other DNA
taaggaatcatctacatt

SEQ ID NO: 299 - DNA, 18 bp, synthetic construct
  source 1..18: mol_type = other DNA
ctaaggaatcatctacat

SEQ ID NO: 300 - DNA, 18 bp, synthetic construct
  source 1..18: mol_type = other DNA
actaaggaatcatctaca

SEQ ID NO: 301 - DNA, 18 bp, synthetic construct
  source 1..18: mol_type = other DNA
cactaaggaatcatctac

SEQ ID NO: 302 - DNA, 18 bp, synthetic construct
  source 1..18: mol_type = other DNA
agcactaaggaatcatct

SEQ ID NO: 303 - DNA, 18 bp, synthetic construct
  source 1..18: mol_type = other DNA
gagcactaaggaatcatc

SEQ ID NO: 304 - DNA, 18 bp, synthetic construct
  source 1..18: mol_type = other DNA
aggagcactaaggaatca

SEQ ID NO: 305 - DNA, 18 bp, synthetic construct
  source 1..18: mol_type = other DNA
aaggagcactaaggaatc

SEQ ID NO: 306 - DNA, 18 bp, synthetic construct
  source 1..18: mol_type = other DNA
caaggagcactaaggaat

SEQ ID NO: 307 - DNA, 18 bp, synthetic construct
  source 1..18: mol_type = other DNA
ccaaggagcactaaggaa

SEQ ID NO: 308 - DNA, 18 bp, synthetic construct
  source 1..18: mol_type = other DNA
agccaaggagcactaagg

SEQ ID NO: 309 - DNA, 18 bp, synthetic construct
  source 1..18: mol_type = other DNA
gagccaaggagcactaag

SEQ ID NO: 310 - DNA, 18 bp, synthetic construct
  source 1..18: mol_type = other DNA
cgagccaaggagcactaa

SEQ ID NO: 311 - DNA, 18 bp, synthetic construct
  source 1..18: mol_type = other DNA
tcgagccaaggagcacta

SEQ ID NO: 312 - DNA, 18 bp, synthetic construct
  source 1..18: mol_type = other DNA
attcgagccaaggagcac

SEQ ID NO: 313 - DNA, 18 bp, synthetic construct
  source 1..18: mol_type = other DNA
aattcgagccaaggagca

SEQ ID NO: 314 - DNA, 18 bp, synthetic construct
  source 1..18: mol_type = other DNA
gaattcgagccaaggagc

SEQ ID NO: 315 - DNA, 18 bp, synthetic construct
  source 1..18: mol_type = other DNA
agaattcgagccaaggag

SEQ ID NO: 316 - DNA, 18 bp, synthetic construct
  source 1..18: mol_type = other DNA
agagaattcgagccaagg

SEQ ID NO: 317 - DNA, 18 bp, synthetic construct
  source 1..18: mol_type = other DNA
cagagaattcgagccaag

SEQ ID NO: 318 - DNA, 18 bp, synthetic construct
  source 1..18: mol_type = other DNA
gcagagaattcgagccaa

SEQ ID NO: 319 - DNA, 18 bp, synthetic construct
  source 1..18: mol_type = other DNA
tgcagagaattcgagcca

SEQ ID NO: 320 - DNA, 18 bp, synthetic construct
  source 1..18: mol_type = other DNA
gtgcagagaattcgagcc

SEQ ID NO: 321 - DNA, 18 bp, synthetic construct
  source 1..18: mol_type = other DNA
agtgcagagaattcgagc

SEQ ID NO: 322 - DNA, 18 bp, synthetic construct
  source 1..18: mol_type = other DNA
tagtgcagagaattcgag

SEQ ID NO: 323 - DNA, 18 bp, synthetic construct
  source 1..18: mol_type = other DNA
ctagtgcagagaattcga

SEQ ID NO: 324 - DNA, 18 bp, synthetic construct
  source 1..18: mol_type = other DNA
aaatgtttccaggacatt

SEQ ID NO: 325 - DNA, 18 bp, synthetic construct
  source 1..18: mol_type = other DNA
caaatgtttccaggacat

SEQ ID NO: 326 - DNA, 18 bp, synthetic construct
  source 1..18: mol_type = other DNA
ccaaatgtttccaggaca

SEQ ID NO: 327 - DNA, 18 bp, synthetic construct
  source 1..18: mol_type = other DNA
accaaatgtttccaggac

SEQ ID NO: 328 - DNA, 18 bp, synthetic construct
  source 1..18: mol_type = other DNA
ctaccaaatgtttccagg

SEQ ID NO: 329 - DNA, 18 bp, synthetic construct
  source 1..18: mol_type = other DNA
cctaccaaatgtttccag

SEQ ID NO: 330 - DNA, 18 bp, synthetic construct
  source 1..18: mol_type = other DNA
acctaccaaatgtttcca

SEQ ID NO: 331 - DNA, 18 bp, synthetic construct
  source 1..18: mol_type = other DNA
cacctaccaaatgtttcc

SEQ ID NO: 332 - DNA, 32765 bp, Homo sapiens
  source 1..32765: mol_type = genomic DNA
agtggcgtttccgctcgggcagcgggctgagtgagctgccgccgccgccgccgccgccgccgccgccgccgctgccgggggaggggcggccgccgcccgcctgcgctcagagactcacgcagccccagtcccgccagtccgccaacacagtagtgccggcccccctctttccctggccctgccccccctccccgcctttggctcgctccgcctttctgccccccacccccacctcacgggtacgggccattcccggccaggaaacgccgtggcgccgcgttgggcctaactcgagtcctgccgcctcccgggagtgccgtgcgccgcagcccgggcccaggccccggcagcgcctgggacaaggtaagggtccgacagaaaagagaccgaacctcacgatcgggccccaggggagggaagggtcacctcctccgtctccccgcgctcgctctccttgggtcgtgggcctggccctccccaagctcttaggaggatgctgccacttctcacccccctcgccgccttgcacacaccgttgcaacaccccattttcccagggagagagatccccctctaatctaggcgacccaactccccctttcatgtttttcctgggtcaggacgcttcccctcccccaacgcctcttcaccccctttcctgggaactgcctactccacgtttacctttcccttgaggagaggcctcttgctgccctccgctcgaaatacacaggcatactttttttctctccccgatcccccactccctacccccgttctcgcggccttgtgacagacaactctgatcgctctgggggccgcgatctcccctccgtaatcttcctggacgccttccctctcgttttctggcttcccacctcagatggctgcttcccaaaggcattaccttcgccacccccaccacacgttctctggctccccgtggcgtgtgccacagcgtgtctgagatagcctcgttgaatgtgtagggttcgagcctggagttgagccagattgtgtcgttttacttgccttgggcgtggagaacgatcttgtgagaatatcttcaaaggcagaaaaatattccctttatgaattctctttccctctgcgtgtaagtcgggaatgtgaagaggagtgtaggaaagagccctggttcaagtaggtaaatcgcatgagagggaaagttaaactgttgggaaagccccttctatgctaattgattctatagagtccttgcttgtctcacttcttgggcgtcagtggtctttctcttggatatggatgctgcagtcagctctgctggtctgggtcaggggtgcgtgtatgacctgcattttctgctttctcatgttacttgtgcaatgtattcaccggtaactcatttctttcccagacctctgggttccactgggctttgtctatatttaagttcatttctccagtttccttcctgcacataggtactgaacgaatccccaagttctgtgctaattaccttcatcagttgactaaacaagtttttagatgacatatttgtgaccaaggtcatatttacatttctttgttggacagatgttacatagctatacttgtgattggggaggatccagctgagtggagtgtgctgagctttttaggagagtgtgtactccctatttgaaattattttttggttgttaattttatattattaatgtttttaggtcacagaaagttctaagtggtaattttagatgtgtgggatctgagctaggactaaagcagagaatacccacgtaatcagaggtttctgggctccatagaggacgtagggcttttttttttctattggatttcttccagttttctcaggatcattagttctcttctgtagccaaaaattctggcctgttatgggattagagtctttaaggtttactcagactgtcattatgtgtagaaaaatgaattatgccctttggtaggacatgacacaaggctctgtttctagctgcaaatttaaattagattgtagagtgcttgggaaattggctttcaaaagaccaaagcttaatcttcactcctaaactgctggcttaattaaaatggatatttagaatttggtaaatgttgatttttctaataaaaggccttggtttaaaagggtgaccttaggattgtttctttcttaaaagcataattccagcccttctggcatggagcactggtccaaaaaaaaaaaaaaaaagtgtgtgtaaggagtgggggtggggtaaagagaaggttgttcctttgggttggatcacaggggtgagtatacaaggcagcagcagctgctggctctggagctctggttgctacgtgagaagcttgagtagtgctggctgctgtctccagggaaggacagcagtgcagcgtccattaatgctgctggctgcagggagcagcacttaggcgatggctgcttcaggactaagaagaaaccttgcttttctgggaattttcactgctgagctggtttgctttttattggtggggagatgggaattagtaattcataatctcctacccatttatggatattggcatctggaaactggatcatggttaaagcctttctttttttgtttgtttgatttgatttttgttttttggcagatttttgttttttatctagacatttgtgcttggataggactaaaagttccattagagttttaatttttcaatcagtttaaaaacccaagtaataattttaagaatctttctgataaccacaataggaagaaaataacaggaattttttcctgcagctcacatatcatgccttcctccatctctttaatcatagaatcaattcttattattttgttatgtgtctccatcctttcgattagaccacatttaccttatagacgatttgctaaacattttactaagcttgaactcttaaactctaaaaaggtgccattttggagtggtttctaaataaatatttttaatttgtatattagtaataaacttctccagattagatattttctttggagtttgacttataagattgattcattatatacatgttggatatagccttctgacatcacaaatatatgtctttggccataatccatctgaaatgtaggacagaccagaagaaatatgcagaaatcgaataagtctagttcaggatactgagaagatggcctctgagccccttaggtgatctcccctcccccacaactcctgaacattaggatgatctctgattaagcaaaacagtctgagcgtggaaaaacttgaaggagaaccaccaccaccaattatatgcaatactggacatattcctgtgtgctgtttttcttccccaagactcgtgtatcctatacttttttctctcagaattttgatttgttcattttcgtgtaaatgtacttaaatctcacaaacatctataatttgtagtatcactctggcatttgtggcagagaaccaaaaagaatggaaatgagttttgtcattcacaaatgtggctcacattgttttcccagtaataaaagcagaccaatgaaacagaacctttaatggatactattttaggaggttccaattcttattactatcacatagataagatgcaatagcagataaatatgatttcatgtatactggctgtttgacatacttagggtttaagataaaaatgtttgtagttttttactctgtggcttaagttgctatataaaataattgcttttacactcgaatttcctgttgtttggaaccttttgtgctcttgatattatcattttttagaggatcatacaggcccttttcatagaaggatttacttaagttatacccttgaaaacttttttatatcttttgatactgttttgtgtccaggaactgactttctgaaattattctggcttttctggggagaatgactatttcatttttacctttgaatggggaaataataaagtgcaaagtacagatttgcagataattacttttgctttatcctctccatgttgaaataacttatgaaaaattaggccatagttaacagcagtcaatgactattggatacattttatcagaggggaactggatcatgaataaaataaaattttaaaaataatttttggctgaactctggtgattcatcagtttaatttgaagtcagaaggtctagcagtgaattttatttataaaaattgtatttcaagtgttgaaaactgaaacttcttgaccagtatattttgtttgaggcatcaaactttgcaaaatgtgcatcgtatatttagtgatataactggtagtcatttgtaatttaaagtattctttcaaaggcactctttagaaagtaatgtagtgtacccgtgatgggcagggattggtaccattccttactgccaaaaattccaaaatatgtggcaaaatgattgatttatcttgtgggtgggattctgggaagttcatgaaaggtggagagaatatagtttccttcacttgtctatatacattttgttaaataagtcttaggaaaactgttttattgtatctttaattatgaattgcgtaaaagatacccagtaactttggggggaggtgctgttagaaagcattacattggagagaattcccctaccctgggacaaaatgcattctgtctttaatacttagcgaagggaactatgggataaaataaacaatgaaggtaagctcagtctgctttatatgtgccctcactgagcaaggaatttgtaatcgcatcgtgcctcattcgtttataccatcatattgattttgtttgctgagtacctgagggaataccttacttaatgtaaggtcacattaagtatgtttgatatgaagacagggaaaggaattttctgcttcttggagtaatgtcttagtatttttaaaacacttaagtttttacatcaggccagttttgcctgatgctcatgtctgttgctttggttgggctgctgctttctcttctgtgttcttatgggttcgttgtggtataaggattcccacagctttcatggcagtatgaagtaatgagaagcattgccttagccatgttagttacatgtatacttttggcctatgttatgaatcacaaaaagcggtagctataggaatgtatacaaaatagatttctgtctggggaatcaagtttttgatttgtgctacctaatggaggggaaaatgctgaatttcttgctgctctgtttgagaaatagatggaagcatgggaggagccagagacctctgcagcaggatttggtctaagtagaaaaggaagatttttgtttcaaattgccagctgcttatgtcagactgactcccttattatgcctccagtaggcctgtcaatatggccaaacagctagataagtgcggggcaggacaaagggctctttgcacagcagggaggcaatgttggtgggggaggggcaggaggtaggaaaggcaagaggaggaggttcttttccctgggagattattcagtttggcatacaattaaagaaatcatttttagttcccactcaagcattgaatttttgccaaccacatactattaaccccaaatttgatacatttcagaatatcttgtagggatccattctcgccaaggaaaaataaaaaaataaataaagctctgtataggttaaaataaaataaatcccacactctgcaccctcctaggtgcaagtcacctcccgaggagacccgttctagagctgaattctcattaagaaatggaaaagaatactctatctgaataaaaacacattgtaatacaatgtgtttatttgggttgggattggacctgaacatgtagaataatttgtttccctttatgaaatagttgctcgtagttgtctacaattttatttcattaagataggtagcacattacagctttcatgtgttgggttgccatatgtaaaatgctaactgaagaaaggctactttttaatttcagcctcatccttagttcctggagaacctgatatttcctggagattactccctcccccaccttttagtttaggcaacctcttttgatacatttgtgttcagctcgcatacaagtgggatagttgcatccagtttattaagacttagtatgaatcatagagttggaaaagatctgttggttatctggtcctttaaaccaaaatcataatgaaatattttgaaatttgggtccctattgaagttttcattaaaatgttaaaggatcggtgttctgaacaacatttttagttacttttaaaataaatgttttgcgtcagttctttttttaaaaataaagaatttcatttataggcaaattagctggcaattatttgaattgtgataggatttctcttttatgaaggaatatatgacaaggtttttcaaaatgcttaatatattttaaaagactttaatttttagaaataattggtttgaacagttttccaagagcacatttgttgcttgggttgaggtaccacctatattgcaatgttactaaactagccttaaagttttcccttctgtctatactgcatgcaacaataaagggaactggaatgttaatttccatttatggattagcagaggagatgttttaaccgattaataaccaaaaaactgcctttcgtacacgtaatattaagcaagcctgaccaagttttgtgttatttctctctgttaaagaaaactggatgtgttactacttaacattatattgttatttaatggtcttggcagtaatgatataatatttcgaccaaaagaaattttgagtaattaattattattgtaattagttggaagtttctcatcagtaaaatagcaacagcattaacacaaaatctagtgagctatattttatattactacagaaatttagggtagtcatttctttctttataatttattcacatggattatttccataaatttgtgggactaaaatagaagccatctagtcaagcaccagtctccataccagacagttttctctgcatgtgctatgacccacattgccagtattaaacatcctttacaccctcccccttcccagataattagaaatctcttcagggtagcttccattgctcctattacctggatcttgctagaggctctaagaagttcctggtaaaagtgagacagtaagggaccacattttgattccaaaggttttgataactgttagggctccccaaacagctaatctcattttcaccaagacttagccagcagagggctggaatggaggtgaaacacaagcactgtacctcatcttgcctgtgcagctgctccaccttatttcctgctattattatctcacaacgcctcctcccatcaaaaagaaactaggacaaagggggaaaattggatgggctaatgtgatttttattatgctaggttgtgggcttgtttatatgtacttaaatacaaagctaatttgccccattcttaaaagtctttagtgatagagattttgtaacttctgtatcttctactttctttcttgataaaccatttcagattctcagccttacagaaagaaaggttttaagcatacttaattttcgttggccgttcacagtcattattaccaccagatgccactgtattattagcttgaagaaaggtgggctctcttctgtacataatatctgcaatttgttttggaaaatactaatttgtataaatctgatttatgactaaaataaggttaaaaattagacctctatgtatgtttaccctattaccttagtgggggtgaaattaattagctctttgaacataaatttttcatgtcttagagttcttttttcaagctgcataatttatgttcttcaagccatttttatcccataccacccccacaaagggggaaattttattttttatcatttttattgtctttcaatggtgagattttcgccaccccactcctgaaatgtgaagactcaaataaaactgagtaatctaataaggtatatgcgttgctgaatgtagtaagatgattgtttcatcattcttagatattatgatctagtttgaatctggtttccagtatcatgttagcatatttaatactgttgatatgttaattttaatacatgcccaggtggatctccttgctttctatttgtgccccttgtttgtcgttttgtatgaagggggtttttgttgttggattttcttccccatctctgtgtcctgttatgttctttggcttatgtttcaaaaattctgtttcctaccaccaacctctgtacatgccacaacacatacaatttgtactttcacagtttctgtgaagtaggatgatctgcagttaataatcaactgtttgggcattcttggtatccaaggaaggttttacttagaaggaagaacctggaaggacctgttggcaattagactacttctgcgtttattttacattttcccttattaacgtaggctgttgagagttgacttgttttataagagaaaccagattgacagagaagacccccaatcagatagagttattttaaaaataaatgtgtttattatggtaacatttggggtagaatctaaagggcatatttttaaaaaaacttttagttctaaagacaaaagagtttaacctaaaacagaacaaagagaagggcctttgaagcagtatgattgattatatgctgaatgtagcattagaatgttgtatgaaagcataaatttttattttctcaatttctatggtacaaactactatgcccatggaagtatgtgtttatgcccacagcctgaaatatattcggtggaatgccttaaaaaagaataaatctggccgggcgcggtggctcacgcctgtaatcccagctacttgggaggctgaggcaggagaatggcgtgaacccgggaggcggagcctgcagtgagccgagatcccgccactgcactccagcctgggcgacagagcgagactctgtctcaaaaaaaaaaaaaagaatagatctgaggaaaatgtaagagcaagtctaaaattttgaagtcctttttgaaatgctattttttcctagacaaatttagtgttatttgtggcaaatagaactttaatgtcgtaatttagtaatagaacaaaataagggtgggtttacatgtccctgcacattttaggatggagctaaaaattataatgtctgcataccaaattgttacacattttaatattggggcttttattgaaaaagtttacccaatatttagaaacctttaaaaacaaagtgacataaaatattcacagataaatcaggtagtcaccttattggtggcatattatgtaagtgtactaaagccagatatttagtgttaatccaaaaatatgaaaattatgctaacatcatatacagatctcagaagttgctgtagccagccaggcgtggcggctcacacttgtaatcccagcactttgtgaggccaaggcgggtggatcaccttaggtcaggtgtttgagaccagcctgaccaacatggtgaaatgccatttctactaaaaatacaaaaattacccgggcatggtggtgcgagcttgtaatcccagctacttgggaggctgaggcataagaattgcttgaccctgggaggcagaggttgcagtgagccaagatcgtgccactgcattccagcctgggagacagagcaagactgtgtctcaaataaataaaaaataaagaagttactgtagatgccactcttacttaaaccctaggccatgtgtggagtcccaggggaagacatgtatttttagagaaggaaggctctaggtaggtgtaaccttcctcttacagtttatcatgaacagttagtatgaaaaggaatggctggaagtttgcagtagtacaccgagcaacaagagaaataaacatatcccacttcatgaaatgactatgccagccaagggagatgaaaaacaattttttttatagtacacctcatttttttaaaaacactttaatactaggaatatgtttctgtggcaaatagttacccccaaaggattatgtcaaatatctcttgtgaaaattaattttaaaattaatcttttggctgggtgcggtggctcatgcctgtaaacccaacactttgggatgccaaggtgggcagatcacctgaggtctggagttcgagagcagcctgaccaacatggagaaaccccatctctactgaaaatagaaaattagctgggcgtggtggcgcatgcctataatcccagctactcgggaggctgaggcaggagaatcgctcgaacccaggtggcagaaattgcagtgagctgagattgcgccattgtattccagcctgggcaacaagagcaaaactatgtctcaaaaaaaaaaaattaatcttgtgtagatagtgaccacgttttactttccttgggacagtcctggtttatacctgctatcctagcgtaattagtaatagcacccgtttcactctcaaaaatgtctcaatttggatcataaattatacgcttaccataattgtagaggattgtgagacttttagtcgctacctagcaacctagtttttcttgatagagctcttcttattctggagtctcctgtgctgcgatttatctgttgacctctctgaacccccatttccaaatgagcagtttttcgaatgtcttttttcttttcccattaggtggtagtaagggaaggagtaggtatagatttgattaattttttaattttttattattaaaaactccaattactacaaaatagaaaaatactttggagtttattaaactgttagtttaaaaggttccatttgatcaggataaggtccataccttgattggtaagtttgagtctttatagattctgttttttccatgtaggattcttgttaaagaaattcattattttgtggagttcgtactctggattttgaaggttggataatcatttaacacattcctctattaaacaacctccccccacctgtatttcatgtaaattactgcttagatagattgtaagcatattttataatagtactgtgtatttccattaagagttacataatttctgcttgtctgtgtaatgttaagcagctgttgttattcattgcctagatcaaactttgtggtcttaaaaattgaagacctggaagagcttttgtttgtgtgaattatgtcaagatttaccatattagaaactaaaactgagaaaaattttaagttatttattaatattaaaataacagtaataaagcctgctaatacaagtaatgtgattttttaataaaaataacatttttaattttataagtgtcgtttgacatttttgcaaatctctttaatgtctgacttaatagaagacagctgctttctcataactccttctgcatttaatttcttgtgataagttgttttggttgaagactgaagaaaatctggccttgtacagataattggttggaaaatggaagacctcatataaccctctgacagaatctagaggacttcaggcattctcacaccaccctttttgagaatcactggcctatattcatgatttacttcatattagatgatattttcttacttcttcatttattgtccggaatactcacccttatttttatttggctatactaagatagtttatatacagaaggtaagataagcacttgggttttttacccccttatttactagttttcaaaataatgggttggtaacttagcaacatctaaagacgtgaatgaagtattattattgtgtactcatggttttaaacatgtttgatatgttacagtctctggcagttactatttttgacattcaggttgtcctacctttgtctgttggctactaaattcttttgattcattcttaatactttcctcacttgtttccttgcttcctactattactagatgttctaggataattttgtacattttttgccccaaacctggaatcagccatttctgcagaaacctcttcattcttttaatgaaaaatggtacttagaaaccacagtatggatggtaggagtgttcattgctcttggtttgggccttgtttctagatttttcaatgaacaaagtttaaaagtattttatttctttttaaaaatatcacttggtattttaaaagctgcatttcaaactcagtgctacatgatgtttacgtaaacctaatctttctccctttccccatgcccaaaatctcagttttcactaacaccaatgtaatttctctttgttttgtgccacaatacacacactacagttttagtgtgacagaacaatatgattactggaaagtggctttttgttttgttttctcatgtctttttgcccttagggtatatccctttagagatagagatagtcatgcctcacttgatgaggatattttctgagaaatgtgttgtcaggtgatttcgtcattgtgtgaacatctagaatgtactaacataaacctagatggtacacctaagctatatggtatagcccattgctcttaggctacaaatctgtgcagcatgtgaccactggatactatacgcagttgtaacacagtggtaagcatttgtgtatctgaaaatggaaaagataaagtaaacatacggtataaaagataaaaaatggtacacctttgtagggcagctccattacagtcttatgggatcattatcatatgtggtccatccttgactgaaatgtcgttatgtggcacatgaccatatatagtcagattacagtattttgaaatcccccttagaatagttctctatggttgtgccaccagtttgatacacagtgaggttaatttgttacattttactttcagatttttcagggattaggttttgttttatgattatgtaaaatacttaaatggttaataagtgaaatttacgaagctgggtataatcagaaaaattgagcttctatcctagtgtcttccagctggttctctccctgtccctgtatgttagactcaacagagtcatcatgaattttcagagtgatgttttgtcgatacttccccttttagcagaagaagcatttaggttagttcatttactaaaactatttccttctagatttttcactaactaatatttttacactgtagaagaggaatgtggaaatttctgttctttcttttttggaaccagaatttcttggcttaatacaagcagtttgagataagaaactttctccagtaaaaattctctttttttttttcttttttttcttttttttgagatggagtctcgctctgtttcgcaggctggagtgcagtggcatgatctcagctcactgcaacctaggcgtcccaggttgaagcaattctcctgtctcagcctcccaagtagctgggactacaggtgcctgccaccacgcccagctaatttttatatttttagtagagacagggtttcaccttgttgttcaggctggtcttgaactcctaacttcaggtgagccaccgcacctggccaaaattctctctcttgaaatgccagaccatgtttgtctctgggaatttcaggtacacttgggacactggtgctacttgaagtgtagagagctcatcagttaacatttcttgaatggtttgcccttagacctgaaatgtatgttatttagaaaggatgtcatatattttttaactttgtcatttaaaatccaagttatttgattttatgtgttttaaataaaatattaaaactttaaaagtcttgtacctgttaaatgttttatccttcctaattacagtatcttaaagttatcacatttcagcaatacgtcactttctaatgactaatatagtctttaaaaatactaaatcaagatataccaaaggtgaagaaatagtgattaagaatgtgaggattctagctgtggttttcttgctttggctttggccaagatgagtttaattctttggtctaataggaataatacttttctcctaaacattatgagcattatttgagttaatgcatgaaaagtggttaaaggaacagtggctggtgcaacataagcatccagtaaatgctgcctttattttggaagtggttattgttacgagtatttgatcagttctctaaactctgtctgaactttacttagaattagtaatgttcatatgctgtaaataacacctgattttcaatacttcattggttatatgaaaagaaccaactgttaacaaaggaataattggtatctagttaaaatttgaggcctctgacttcacaagtataccagtgcttactatataaatataatcacatttaaaaatttaataaagaaagttttaaggaagtaagtctccttttcaggatccagggtcctttacaaacactggatcctgaaattgtattatttgttgtggctttagggtattgtgtatgctgaccagagtcacaggtggtttttttgtttgtttaacactagaattttgagatacatttgtctttacatgccctcaaagtaagttatataacaccagattgttcattagttcaggtttgatttttttgttgttgttttttgtttttctttttaatactctggggttggagtgaggttgtagagtgctataaggaattcctattagaagatagtattttagatatgggcattctaggaaaggacaaaatggtacactaaagttatcttcccttttcccccaccaccaaaaaaataaggagcaaactacagtgcacagttttgggttttttttttttttttttttttttttttttaaagagacaaggtcctactctgtcgcccaggctagagtgcagtagcacaatcattgttcattgtaaccttgaaccactgggctcaagcagtcctcccacctcaacctccagtgtagctaggactacaggtatgtgctaccacacccagctaattttttaaaaaatatcttgtacaggtgggggtctcactgtgttgcccaggctggtcttgattgaactcctggcctcaagtggtctcatacctcagcctcccaaagctctgggtttacaggcataagccatcaggcccagcccacattttgttttttaaacaagtctttatcttttggagatacatgctgaaatatttatggatgaaatgaaatgttatctggggtttgctttagatagagaggagataatagatgaaacaatcaacttattagttggtcattgtcgatactagataatgaataaatggacttctttataccattttactttcatactttatttgaaacaaggtcttgctatgttgcccagctggccttgaactcctggcctcaagagattctcatgcctcagcctcccagagctttgggattacaggcatgaaccaccatgcccagcccataatagaaagttttaaattttaaaataaaagtattcatagacttggctatcatggatcctggtaaagtagactagtgaacataatcagatgtttcagtctttccctgttgatactgcttgccctctgagcccatttcctctcctgatcatcgcctgctatttccaatcaacagaaaaaatagagtagcctacatatataatgagtttatactaagagggaaattttaatattataaagaagtctatacagattctggagagcattcctgaagagaagattgaggaagcaaatggattaattaatgtaatagtgtgttcagtgtgcaataggtaacattttatgatatggttgaatttctgaaaaggtatcttataaatatcagaccatatttaaggagacttccacctctactgataaaatctgcccttctctctccccctgactttattgctgcccatctgtagttttgatcttttttctctaggattctttgcctagaattgccatgggccttctggatctggaacacggatgaaggaagaggatgaatgtttttcagatgttatcccttatgggagtaatttgtaaattctagcttcttcgggtggggggaggcggggtgtgtgtgtgtgtgtgtgtgtgtgtgtgtgtgtgtattatttatttatttttttaagttaattggcctcttccagcaaagagtatacagcagagacctagaagtttcattttttgtttgtttttgttttgttttgttttgtttttgagacggagtctggctctgtcacccaggctggagtgcaatggtgtgatctcttctcactgcaacctctgcctcccgggttcaagcaattttcctacctcagcctcccaagtagctgggactgcaggcgcgcgccaccacgcccagctaatttttgtatttttagtagagatggggtttcaccattttggccaggatggtttccaactcttgacctcgtgatctgccaccttggcctcccaaagtgctggaattacaggtgtgagccacggctcctggccaagacctagaagttttacgtcaaattttgtctctgcagttttctgaggaatgagtatatgtgctcaaataatagctaagtattaagtctgaaatattctagaaaaacagtcacaaagtagttatgcctaggatgtttttgaatattggtactagaacaaatggattcctactagatttcctttttactttcatattcagatgtaggaagagttggaattcaaaatgtgaaaagcagtcttgaatctcagtaaattcttaagaaattcttaattcattgaagagccattggtcgtgtgtgttttttggggagtgtgtgtgtgtgttgttgttgttaagaattcggggatgagtatgaggctatcattgcttctacaaggcaacttaatgatagtttgctgcttggcacaacaggtgaaagggcctttctagagcagggatcttggtttccctttttcccacctagtagtatcattccatgtatttaccaggatatacattgtttagtcctgtcttggctaaataggtaatggtccttaaggacataaaatggaaggatattgtgcagaagaattactagttctccgtagtgtatttttttactgtattctcctcatcaacagatggaaaatttttaaacttagaagaaaaaacaagtgtttttctccaaaagattgagaaccactgcttttaagttattaatggaggtcttcaatggatttgttaaaaatctggagcatggattttttttttttaatttttttgttattggttactgagtattggaaaaggaaatacagtattcaaaaacagtaatgttcaggatttggaactattttactcaggaaaaaataagtttataaatagacattttaatgaaaaggaaaatagcaaatttatggaaatctgagatagtctgtgttttgcttcactctgtttagtgctagaattctggactttgtttggggtcaaactctgatatgacaggaaaactaacagatgattaaaagagacagtaacataaatgggaaagtttaaatatggtatatggttttaattatattttgtataagaaagcagtttataccagttgtattcctaactaaaaagtactattttatcagtttcctgggactaatttattataagttaattaatgacatgagcattttggcccaaatacagttgaaatgttcattgaaactggatcaaagatgagcatatgtgtcaaggctttaaaatcatttttcatattaagatttccagagaaagtttttgtaatatataagttaaatatttttaatgctttagatgacaggaactgttgaaggtcctggatctcataacaagccactagctagctgatccaaagacatttggccccatgggcttctaggaagacaaatgtgcttaccatttcaaagattttattttgctcagtaacctactagacatatattagtgtttgtttgagttggtcgttgtcttccattgctgttattttattattattatttttttaattttagagacaggatctccttgtcacccaggctggagtgcagtggcacagtcatagctcactgcagtctcaactcttaattaggctcaagggatcgggatcctcccacctcagcctcttaaatagcttggactacaggtatgcaccaccactcctggctgtcttattgtgttgcccagggtggcctcaaaactcctggcctcaagtgattctcctaagtcagcctcccaaagcgctaggatacaggtgtgagccaccctgcccagccccattgctgttgaacttttttttttttttaaagacaggctctggttctgttgcccaggctggagtgcagcagcgcaatctcagttcactgcaagccacccaccgagctcaagccatcctcccacctcagcctcctgagtagctgggactataggtgtgcaccaccatgcctggctactttctttgtaatttttttgtggttcaaataggaatcttccacgtgcatccaaaatatttttggtttgtgacactcagtgttattattgactcatttttccattggaaggtgtgcctcagagtgggtgagcctttttgccctcagtcttctgtcagcactctaagactccaagtactctaagagattgctcactaaaaataagaacagctggccatctacctcaaatgtgagccgtcacttttgtgatataatcagtccttatctttagtacacagatttatggaatatcacactcactgtctgcctgctttggggtgtttctcctgtgtcattcatttttgtatattggcatatagcaaatataggaatgctgtgtcgcagctgtgggtcatgtatgtacttgcagttagctcttgctcccaagaatgcaagaaatttatcaacaaactcgtgtcataaaaatagtttacagtgatttttttcttaaaatatttcaatgattaagactttttttaataaccacaagtgtataattgtaaaacctaagcattactcagcaaatctagcaattgttgaattgcataagcttcttgttcattggaacttttgctaaagaattatgacctttgatttcttatcaccatgacctatcattatgataaacatgcccctcttatgtatccttatacccattataaggataaacaagggatagctccacccaccagatgtcatagacacaactggtattttggggattttgctgtagactaatcctggaaggaagagaggttatagataaaataagattggccatgaattgattgttgattaaagctgggtagggaacattgggttttctctggttttatatttatttgaagtttttcaccataaagttttttttttttaagataaaaaataaaagcatgaatagtgtaaacaaagttttgaaggagaaggaaacaggttagtagctaattaacaaaaatgttcttgttccattcaggcacaggagtttggactagcccaataagcattaaggaaaccattatttgtagatttcagataatgcaatgatagtaaccaaagttatgctctagaagggataacatcatggaagaatatagagtagattggagggttcacaccccagaggtagtgagaccagttcactgctattatataatgctaccttgaaatcatagggaggcgactgatgtggtttgctaaaagtctccaaaaatttcaaaggagaatagctcttcagtcaggtgctagtgccagcacaacaaaaaagagggttttttccctcatttggccagggcatggatttggaccatgtgggtgtcataatggagtataccaagtgattttgttcctatgatgaaagtgaagtccatattttgtctcctgtcttttagtaaatcagtatagataagtcttttttttttttttccccccgagacggagtctcgctctatcgcccaggctggagtgcagtggcgtgatctccactcactgcgagctccgcctcccgggttcacgccattctcctgcctcagcctcccaagtagctgagactacaggcgcccaccaccatgcccagctaatttttcgtatttttagtagagacggggtttcaccatgttagccaggatggtctcgatctcctgacctcgtgatccgcccgcctcggcctcccaaagtgctgggattataggcgggatccactgcgcctggccaagtctttttttttttttaattattttattctttatttttttccccacatattctaaaataagtctcttacagtgtctaggtttctttccaaaggtgattaaaaatgaagcatcatattttaaacttctgaggcagaactgctagaacaagagttttgttttttttttttttttgagacggagtcttgctctgtcgcacaggctggagtgcagtggcgcgatctcggctcactgcaggctccgcctcccgggttcacgccattctcctgcctcagcctcccgaatagctgggactacaggcgcctgccaccgctcccggctaattttttttttttttgtatttttagtagagacggagtttcaccgtgttagccacgatggtctcgatctcctgaccttgtgatcctcccgcctcggcttcccaaagtgctagaacagagttttgataatttgtttgaaacgaagcactcaaatcttctagtttatttgcatttgcagtcagacctctacagatgccagctagattacagatggctagcataagtttttttcattacagaaagaagaaatttagagcttagtgcggtctattaaaagaattaaaggttatgtcaaaggacaactataagaaagtactttggttctgaatattgcttcagctagggtttattttgaagctcctagcccaaatttgtagaaatgcaactaagatctaatatttagtgtgtaagaactttacaggacatccagtcagtagtagtcttaaaagtgaatcacataggctgaagcaggcagatcacctgagcccaggagttcaagaccaccctggccaacatggtgaaaccccgtctctactaaaaatacaataatcagctgggtgtggtggtgggcacctataatcccagctactcaggaggctgagacaagagaattgcttgaacccgggaggtggaggttgcagtgagctgagatcctgccattgcactccagcctgagcaacaagagcgaaactccgtctcaaaaaaaaaaaaatgtgaatcacatacataaacattgggaatttgcagataactttcattttagggtttctagagcgcagtggtgtaatcttggctcactgcaacctccacctcctggattcaagcgattctcctgcctcagcctcccaagtagctgggattacaggtgtccaccactatgcctggctgatttttgtatttttagtagagacggggtttcatcatcttggccaggctggtctcaaactcctgacctcaggtgatccacccgccttggcctcccaaagtgctgggattgcaggcatgagccaccacacccggcccacttacaggatttttctcccccttcatggttgtataaatgcagtacttggcacataggcaaacctgaacagtttgcaagttgcctacccttttctactttggataaaataaacctcttaaaatagcacttaacatagtaatatatgtatattaatagtagttacttcatgtttgttgaatgaatgaatgaaaaaagtagcaaatctacataatataaatcccaagacagccaggaattttatctggacctaattgtcttacatagcaccaattggtacttaataaaaacaaggctgggcatggcagtatgcgtctgtggtcccagctacttgggaggctaaggtgagaggatcgcttgagcccaggaggttgaggttgcggtgagctgtgattgcaccaaagcactccaacctgagtgacagaccctgtctcaaaaataaaaataaaaacaattagttataactcagatgttgctatctaaggtaagtagtaattactataataaacaagctatatattaacatcttaattttctttcctctgaactttactactgtaggtgtgtagtgaacttcatacaagttaatctttttgtagctctatttcttcatttctgtttgttcatcggttggagaaattttgcttaaattaatgaaagtaaaaatacagatattaatggctcataaatgtgcacaacccacttcatctatagtaagtaaaagtggctcccattttggggtttgaaaatgaagaagatctgaattcacagagaggaggcacgtgtagagatatgagaagttcttttcctactctactttggtacattggtctctaacacatgttctgagcctcagaacacagtagaacagaaccttcagaaagtgttgagagtataactctttaaagaggtttagtcagtctaaattatttgagggcatcatctttatttggtacttagaagtctaaaatcttcctgattgttgttaaggttacaaagagtctgtgtattgttggttagttgagcagtaaatacctttttatcattgttaaatgggttgtaaataaaatatttttcttcagtgttaaaataatttatgatcacaatatttagataataataataataattctgttatttatgatatgtagtcttatcctactgccactcccctcttctgctccacatactactaagtatgacttggtctctataatacgcactaattatgaagttttttacggagaaggaaattcttaatatagactaggattttttttcagttgtcttttaatggccttttattctagtaaacttagatttcttatagacatcggtttattgtgccgagctcagtagctcctagagggagtataaatttaggcaaaggaatcaaggaataaactggtattgtagaagagatgggagaaaaggaaatttttatttttgctttaaattactaaatcatgatgtttcctgtctctcagtgcttaccccaatcagtgtttctctcttttcttttttcctttcagtcccgaacccctaaaattctttgcttgcattaacttgcttcagattataagcctaattttactgttccaaatacatgaacttttcactgtatctccaagtgctcttttagagttcatctctttgttttccagtaactcatatttgtttcttcttatgcttaacacttctctctcatttttttttttcatgtttctcacattttttctttccacattatctgctgtagcaaacttgaaatatatgcttttggagaagagtaaaaacagtgtttagccatattcaggttattagcagcagctcctctttcttcacatatacttaaagggaccagaaagttatttaagctcttacttgctacaaatgctgttccatgtgctcctatgagtcagcacaacaggtattttttttttttttattgtacagatgagaaaactgagactttgagacattctatgaattgcctgagctagttggcagcagtgccaggattcatagaaatttggagcaggaagacaacacaatgaagattttactttgaggaatttagggttcatctatgtaaagtgatttttctgaggtcactaattatgttgtaggctagaactcaagtctcctaactcctaatatagtgccttttttttcttttctttttttatttttttaggagatgggtctcactatgttgcccaggctggtcttaaactcctgggctcaagcaatcctcctgcctcagcctcccaaagtgctaggattacaggtgcaagccaccgcacctggcctctaagagtgctttttcctagcatacttttcttctcctaaggtaaaaggctgtttgtcatggtacagctacggtgattttacttgagatatttgactttgagatggagatgaagataagtatataatgcagctgccacattcattctcatacaaggtaaagtcattcaaaagataaatcgaagaactatagatgtatttaagaagaaattcagcctatatgtaacaacaaaattttgaataatcaagttcagaaattggatttttaaaaacttattagctactttaacccttttgaaatattcccaaaaagtgttttctcttcctgagttaaatttattcatttattgacctattaaagatttttttagtgcttcagagctattctgtatatctgttcattttcgttatttagtagtatatagaagtaatagattgggctgaatagatttatttcaggatatatcttagatatttgtgttttttcatgaatcccagtttaagggttattgctttcaaaaggaagaaatttggttagtcatgacttttggctagttgaagtttagagaagtgctttatacaggatcttttatttagtgagaaaaaaataactttttataattttataatactgtgtgaaaaacctgataccaaaacttctgaaaaagaaaccaggcctaggagatgaggattctagggaagattattaaattgaggatatttttaagttagattctaaattagtaaatcgtggctaataagatgaaaataatctgatcctttagtaagatctgaagtaatattgttgccctgcaaaaaagtggttgttatcagcataccttatatgtcagcctaagcaagattagattttctcttttctctgatagatgccaatatttaacattgacttttatctactttcaaaaatatctatgaaatatactttctgtctctgaattagagtgtatgtatatttgtgtttacttgaaatgttatagctggatgatagatttcagagcagtttttatgcttagggaagccactgcctcccaaaaaggttttcttatgagaatgaggaaaataagtataaattttcatatttatgttattactattgatgtgcttggataattgtatttataaaagtaaaaaatgttcagtattttatctgaaatttaataatggatattgtacagcctaaggaattaaaagaaaaaggaccctttgagaaaatggcttgttcttatgtatcttaatatatactgtgttcactttatgttttgtcagacactgaaattgaggaagagagattttggcgttctgttggtttatggagagagttgatcagagattgctccttggctgagttgctgtctgcataggctgttaacaattgtttctctggcagcagatcttgttcatcaggattgcatcatttctgggagaatggccaaggtccacagcctcaatacaaagactgtctgaagcatatgaggcctgttctctttctgaagcggcactcctcttcctgccagtcctcttcacaggattactgaagcagacttgttctgaatttctttcgttggattggttgtttattggacttttgtctgccagctgcttccgcctcacctgtctgatgcaatttcttcttctgaaatctgttggaattgttcataaaacactttttgtttgtcttctctgtgagtgaccagggagatcatacaggtcttgtgctttcagcaagtcatatagagaagagactgtcagaatgatgatacagagactgttggccatttctgaaaccaattaaaaagatggggtaattaagaaacatttctggcatgttctatttaacatccttttccctagaaactgtatgtaaatggcacctcctaaagagagtactcggtactactggaagatacaggctgtgtctgtttctgaatccaagaacttactagtgttcctgtggattctgatggattgttctggaaatagttaaattaataataaattgaaactgtgatgcattcatttaccccctactgtacactcacatctatttcgctgttttcctcctttcctttttttctttcttatttgctattgcttcttccttgatttactttatttcttccttccttttactgttactttgatacttttatttctctaattctgggtgtactattttaaatcgtttctaaaaaatagtttattttccagttttttaaaattagaaatcataaaacatcaacataaatgaaatgcatgcgttctaatgcttggtaactggaatcctatgaatagctcttttcatgtttatgatatgttaatctttaaggtgttaataactctggctagcgttaaatttgacttttaggaaaaaacaccagagacttaaaggatactgatcattttcccttcctttttggaaggtagaaaattaatttaagcgccattttttaagcatgtttccatttgaccgcaaatagaactgactcctttttatcactcttttttatagtaggacaagaaactagatggtgtggaatgaagggaaagaaaggagtaataaatatggacttgtaatttaatgggtgatgatggccccttgtctggctggacagttgtcggacatcgggttaaagaaagaactctgaatttgagaagtgttcagtgaagaagggaagcaccttttaggagagagaaaaagaagggatcccttggaaaatgagataattctaatttgaaggaagaggaaaaattagccagtgacataagtatttaccatttaagtcaaataatttccttctctaccatctcgtttctggctttatggaaaaataaaaaattaaagggcaaaaaattcagtgccggatggacgtagggtggtaaacgagatagtatagatgtaggatgataaacaagacagtatacagaaacataatatagctgtagaattccattctgtgtgttcatcaatgttatttctttctgtactaatttttgtctcaactttttctaggtcttcagaactactagcagataatttggggggacttcatattcagaagtctatataaaggtgactgacccaagtaaatccttttaatttctgttttattttttgcattttaatgactgctggaatcatgttgtagtaaattgtgattataatttacttagcagatatttctggaacttctctacgtgtcagttattgttttggccattgaaactacagcagtggataaaaatccctgttctcatagagtttatattctggtaggaaaaaacaaacaaattataataagaaaatactgcatttagatgatctgttaaatgttcctcggttaacattttaatagctacattttacagagttacttagggaaggaactattcttagggtaatatttgagaaatttgggattattaacagaatttgaattaagaagcctcatcattattaaagcattagttagaatgagatggtcaagctaacctattatggttgctttcatcagaagaatgaaacagtcatgttaaactagacacaaggaaaatggaataatttttatgaaatagaaatttatagttaccgacaatgtttctttttttttttttttttttttttgagacagagtatcattcttgttgtccatgttgaagtgcaatggtacagtcttgactcactgcaacctccggctcccgggttcaagcgattctcttgcctcagcctcccaagtagctgggattacaggcgtccgccatcgtgcccggctaatttttttgtatttttagtagagacagggtttcaccgtgttagccaggctggtcttaaactcctgacctcaggtgatccgcccacctcagcctcccaaagtgttggaattacaagcgtgagccactgcaccgggctgacttaatgtttcttaaggattcatcaactatccaaaatagctgggttggtgtttcattagtgaatgtagcaatcatttattcactcattaagatgttatctgaagtaacttttccatcttttccttttagtatatcttttaaaaattgctctaggaaaaatatcaactatcatcttgggtttataacttgtcttttatctagaaactgtactttttttttttttttttttggagaaagagtttcacttttgctcaggctggagtgcagtggccctgtctcagctcactgcagtctctgcttcccagattcaaacgattctcgtgcctcagcctcccaagtagctgggatcacaggcatatgccaacatgcccagctaatttttgtatttttagtagagatagggtttcaccgtgaaaccatgcattttttaaatgggtgtacagtcgtaatggctacaacaaagggtttttaatgatattaagtacggtttttggtttaagtcttttactgaaaatataaaacaattcagattccctttgctgatcaggggaggtacggtgataatcagactttcatatgattatctggtcagacagctttggggcttttcttttaatctgaattatacagtaagactaatagaaagagtagtgaccaacagcccccagtatttaactgtcttttgggtttacttgatgagtgttcttgttttatcatttacagattttacttcaatttcccaaaggcttagaagatgtactgccaaggtctctgtttggatatactgttagggaaaggaaacatacatgtgtaagactggcctaaaggcaaaaaagttcatcagtccctttttttttttttttttttttttttttttttttttttttggcaacagggactcactttgttgcccaggctgagtgcagtggcatgatctcagctcactgcaacctccacctcccaggctcaagcaatcctcccacctcagcctcttgagttagctgggactacaggtgcatgccaccacaccagatttattttttttttttgagatggagtctcactctgtcgcccaagctggagtgcagtggcgtgatctcggctcactgcaacctccacctcctgggttcaagagattctcctgcctcagcctcctgagtagctgggattaccagcgtgtgccactacagctaatttttgtgtttttagtagagaaggggtttcaccacattggccaggctggtctcgaattcctgacctcaagtgatccacccaccttggcctcccaaaatgctgggattacaggtgtgagccaccgcgcctggcgcacaccaggtaaattttgtatttttagtagagacaggatctcgccatgtttcccaggctggtctcgaactcccaagctcaagcaatccacctgcctcagcctcccaaagtgctgggatgacaggaatgagccacttcatctggcccagtcatttcccagcccagctatatgtcacctccaattgggtgtaggaacaggcgtattgtcatacccagaggtctcacttcatcatctaggctggagtgcagtgcatgattatggctcacctcagcctctacctcctgtgctcaggtgatcctcccacctcagctcccaagtagctgggaccacaggcacacatcaccatggctggctgatatttttttactatttttgtagagttggggtctcactatgttgtctcagctggtctcaaattcctggactcaagtgatccttccaccttggcctcctaaagtgttggtattacagttgtgaaccactgcacccagcccacaattttttttatttgcattaatatcaaagtaagattggagcatctcagaccatctaccatttacaatttacattaaccggccaggcacggtggctcacgcctatagtcctagcactttgagaggctgaggtgtgagtggatcaccggaggtcaggagttcaagaccgcctggccaacatagtgaaacttcatctctactaaaagtacaaaaattagccagacatggtggcaggcgcctgtaatcctaactacttgggaagctgaggcaggagaatctcttgaagccaggaggcggaggttgtagtgagccaagattgcgccattacacttcagtctgggcaacaaaagtgaaactgtctcaaaaaataaaaataaaatttacattaaccccctgggttgactcagtcggtatcatgtacttttcattcctttagtttttttagtattaataattgttctaatgtcttattatgaatcagtgtatcagtcatgactctctttgtagtcttttttgcaaaagtccttgttaacatgggtctttgacattcacattgactttattcccccccaaataaaatgctttttgtttcatcctttcaatgttttttacactactgtaaaactactaatgtaaagtcacacaaagaacacttgtttccctctgcaccatacctccaaatctcttaatctatttttgcatttttttatacttcagtaatttctgagtctttctgttcccagctttcactggtttatggtcaccatgtcaagctatcctcaccgctttttcatacacagttgtttagtctttatcatgaaactgtactcttcgtgatttcgggggtttttttgttgtttttaaaaagtagtcaacttttttagagcagttttaggttcacaggaaaattcatcaggagatacagagatttcccatgcaccctctgcacccacgcatgcatagcctcctcctggtttatatttttgttcatatctagcagcgtattattaccccacaaataaagttgctaagatgattgcatcttctcccaaaattatagttaagatgatttaaaagaaggaagagagtgttcaatgacaaaagaaggcactaagaaacagctgtttccaatcaagtataaacaacaaattgatctcttttaatttggaagaaataacattattgactgcttgtgaaactgcatttatttgtggcctaggaaaaaaacttaaatgaagatcttgaatttttaaagagtttaggtaaactgggatatttttaataaccatcctttatcttaaaacttgtttgctatatcctaggctgccagaaaattttgtttgggcagttttagaatggggagaatgtgttggttagtgagataggcagactcttcctttcccttcaactgaaaagaaaaacaaaagtaaacataactttttgccccctactttgtgaaacattaatgaaatgcatagtaaacatgggacactgtggctgtatttattttataattatcccttaaaagccttattcaagaatgcagaaaaatattcagtaacatttaagataaacttgaagaactatctgataactaggtatttattttactagatattttccttttctgttacaggattcctcatgtccataacatgttggatgaggctctgcagctcacccccactctcagagtggtcagtctccattaattggaccccgtgatttccaatctctgctgtgttggacgtcatgagcattgcaatccctctgggagtcaccacatcagatacatcctactcagatatggctgctggatcagagtaagtgctactttctaggtagtaggtacattatcagtctgtgtggagacagccttcttatggatagctaataggataatatgtagtattttcttaaccagatcctattccactgtaattaacattagacctttccctttacccccattgaaggtggtggaaaaaaggaattagaaggggaaggaagagttttcagaggggtatttctgggcaaataattaatagaaccaaagttgcaaagtaggaattcattttcatttgttttaatgggtggagaaaattggaataaagtaggtgttactacctgcttctgtagagttaatgattctgatggagggagataagaaggtgttctttccaactgattttccttgaagtcctcttcctatgtacttcccattgttctagagtaaaggggccgaaactatatgggcaggttgcctagaccttctgacatctggggtagaaaacatggagaacagcgtcatctgtttttttataatattcgttgcctagaaagaggaccttcaaaatcagtggtaccaaacttttttttcagctaagagcagctttaggaattcagagtttgtccaaaggcccaatccctaaaattatactctcaattcttgaagaatgtaaatgccaaatgacaatgaaggtaggccttcattatacaactttatatatattattcacagttttaaaatttttagtcttttgtatcccttctcttttaagttgtccgagattccccctgctcacagattccccctcttgtccttttacctcccttgtacccaatcttccttgcttacagaaaggaagtggaagccccctacctttcaagacgaagtggcactacaccaggatgtgaaagtccagcgaaagagacccaaggggcctagggggcagcacacccccagaagccaagtctattccaggcagtaccagggattagggtctgggctggaaaaatcctggtgttttgaatatgttcaggtccagttcagactcttgatcccacagccacttcttgagtgaggtgggtgttgctctaattcccctgtttctcttgccattttcacagtccctggggattcttcccccttcagcaaagcaaagcaactgtaccagatttctgggttgaatgacatccctgattaataagtggttttcttccttaaaacagaatattattaaagagcatgtatatttcttcataaagccacctaatataacttacctgtttactgagttccttaaagaggaagacttaaagctaccctgagaaatagtatataatattctggggtagtctaaaatgaaaagcagtgtttgggcttattcccatataaaaaggagaaaggagg

SEQ ID NO: 333 - DNA, 41 bp, Homo sapiens
  source 1..41: mol_type = genomic DNA
atgattccttagtgctccttggctcgaattctctgcactag

SEQ ID NO: 334 - DNA, 338 bp, Homo sapiens
  source 1..338: mol_type = genomic DNA
gtaagatcctgttccatctaaatttaagtctgggttgctgggattagggtttcttacaagtagggaaaagctcaaagtattctttcttgtgtttgttaatgtagatgattccttagtgctccttggctcgaattctctgcactaggtgagaattgctgacaacaaggaatgagagattgatgttaaagctattgaatttgatatgaaatttaatgtcctggaaacatttggtaggtgggagggagggggtagcatatgcagagacacttcgcccatgtgtgctatgatgtgatgcatgctgttggaaggactactttaagtttattttccctctttag

SEQ ID NO: 335 - DNA, 225 bp, Homo sapiens
  source 1..225: mol_type = genomic DNA
aaaggaagtggaagccccctacctttcaagacgaagtggcactacaccaggatgtgaaagtccagcgaaagagacccaaggggcctagggggcagcacacccccagaagccaagtctattccaggcagtaccagggattagggtctgggctggaaaaatcctggtgttttgaatatgttcaggtccagttcagactcttgatcccacagccacttcttgagtgag

SEQ ID NO: 336 - DNA, 4835 bp, Homo sapiens
  source 1..4835: mol_type = genomic DNA
gtaagtgctactttctaggtagtaggtacattatcagtctgtgtggagacagccttcttatggatagctaataggataatatgtagtattttcttaaccagatcctattccactgtaattaacattagacctttccctttacccccattgaaggtggtggaaaaaaggaattagaaggggaaggaagagttttcagaggggtatttctgggcaaataattaatagaaccaaagttgcaaagtaggaattcattttcatttgttttaatgggtggagaaaattggaataaagtaggtgttactacctgcttctgtagagttaatgattctgatggagggagataagaaggtgttctttccaactgattttccttgaagtcctcttcctatgtacttcccattgttctagagtaaaggggccgaaactatatgggcaggttgcctagaccttctgacatctggggtagaaaacatggagaacagcgtcatctgtttttttataatattcgttgcctagaaagaggaccttcaaaatcagtggtaccaaacttttttttcagctaagagcagctttaggaattcagagtttgtccaaaggcccaatccctaaaattatactctcaattcttgaagaatgtaaatgccaaatgacaatgaaggtaggccttcattatacaactttatatatattattcacagttttaaaatttttagtcttttgtatcccttctcttttaagttgtccgagattccccctgctcacagattccccctcttgtccttttacctcccttgtacccaatcttccttgcttacagaaaggaagtggaagccccctacctttcaagacgaagtggcactacaccaggatgtgaaagtccagcgaaagagacccaaggggcctagggggcagcacacccccagaagccaagtctattccaggcagtaccagggattagggtctgggctggaaaaatcctggtgttttgaatatgttcaggtccagttcagactcttgatcccacagccacttcttgagtgaggtgggtgttgctctaattcccctgtttctcttgccattttcacagtccctggggattcttcccccttcagcaaagcaaagcaactgtaccagatttctgggttgaatgacatccctgattaataagtggttttcttccttaaaacagaatattattaaagagcatgtatatttcttcataaagccacctaatataacttacctgtttactgagttccttaaagaggaagacttaaagctaccctgagaaatagtatataatattctggggtagtctaaaatgaaaagcagtgtttgggcttattcccatataaaaaggagaaaggagggttgggggtggggaagggttgattttgtttcttctagagcttttttcttcttttgtttttgtttgttttgttttgtttgcatgcaaaaggtatttagttatgtcagtaactgagacttacttaaccattttacaactctttccccaaataaagtacttaaaactctccctgcattagtaggtagccagtttgtattgtgtttataggtttttataaagtcagctactaacctggtactatgtagattgtctaactgtatagatagatagcattaacatttgtgagaaatttcaacaaagaggttaaaccaatacgtttggaattgctggataaaagacccagagcagttaatcttacaattggtgttttccccaaagtatagacatgactgcccgtaaatactgctggggagtctaggactaattccagaaataaaaatacttctggtctacaaatgtgactgcgctgtctctgttaacaccaacatatcctaggatttcctgaaacattttcattcatgatctccagacagatttgtgatactgtggtcataactagctacatagttatgcatttctgcaaagggaaagaatgtcagtaactagctacataccattctgttaaattattaatgatatttattaatgtttcatcatgcctatttcgctgttctgggcactttaagattaaacctggtattaagtgcagcatactcaactagatgtagacttcacttcatagaattttaaatctgatggcaactatatgcaatacgcatttatttttgtgtgtgtttgtaggaaaatttgtagatgtaacaagcaaaacaaagatttttctgaatttccaactctaccataacagaatttcaggcattttccaagaaatggcatgatagcagctgggttgcatgttgtacttagaacactgttgatggagtatatctgttgtgagcctggtttctgtgtatgtgtccaattcagtgataggagaagaaagcctgtaattacatttgcataaagtggttggctgctaaagagatgtaattccattattccaaacttttaattcatattttaaaatataaaaactagtatatatatcaaggaatattttaggaaatcttgtagttacctgtaagtgtctaactgtgtattcaatcagtaaccaatatggaaattgcagagtttcttcatcagaagatatgagtttaaattttatatttggcatgcacagcaatatattaaatgctgtgcttaactagaaagtattgtgcagtgtgatggccttttaacctccacaatatacattttatttttattccctagacttgcacatgaagtgcatatgttcatatttacccgtttggagatgggtaagatacaaccagcatagctccatctccatggccatctttgatttcatgcaactttcctttttcctgtccccctcccaccaaaaaaaaatccattcctaataaacagctatcatgtttcactccatgtgttcagtggtacaaaacctatataaaatatgtacagctctttggaatacttgtttatctagtaatgtacctagtaaattaacaatgttgtataaatttattactttcttttaactgtccatcatagaaactaaattataccttcattttattaatgcttgtctgcctttggtttcatttaggaaaccccacctgtttcctaatactcagagatgattgcctctcagtgagccatgttcagatcatctttttctcaagaatactgacctgcattcttgatgtacccctcccccgttcccatcttgcagacacttttaagtaataaaatgcatgcacctcactaacagagaatactttcctctgtctaaagttcttcacttagaaatttcctttgctgttattaataagatcctttctcacagttttggagcatataactgggtgagttggatacatatctcagaattttctttgatccctcacttctcaattgacattgcaccacattgaactgcacacttattcctgctgtactatatattgtatatctttaagcaggaaaaaatgacttgttatttcaagcgaacaatatgcattatttgactccctgaaagacccattaatctctaagttagagttataccaatcatcggagtttctaatttgtgaatctgtgttctaattaatataaattacaaattactattctattctgcaaagccatacaaactttatatttttgaattacccttcagtattccctaaaacctaaccaggtaacaatcagagttgaagttctttcttcccataaacctgatttttatcctttgccatcaaagcctttttattgtaaaggcttatattaattttctaagtttgaatacatgtataattctacaataatacattgcgcttgaatagtttattttctactcacaaagggtacaaaaagatactaaaccaagcttctcactaagcctggttaataaaggtctcaaataattttctttaaaggactgaatgtcattctcatttctgtagtggaaagagcatagactttggagtcagacagactttgtttcaaatcttagctgtgtcagtgtgtaaccttggggaagtcatgtaatctcaccaccacatcttcccactctgtaaaaatggagtatataccatgtttagtggttgctgaaattaaatgaattaatatgtatttaaagcacctaacaaatattgggcagttcacaatggtagccattactgttgttattatttgtcagtagactaacataactttacagtttagtttttattttgaagttctatggtattatcatgcagctgataaataattttgtccttaatatgcttgcatgtcattggtggatgagaaattattactctaatatttgaaaggtgttgggggttcatcaagatgagaggtatgataaatataagatgccattgtttttacctgtactttcttcagggtatcctgtcttggtagtgaatggaagagggcctggtccctggggcagtgcagaaggcactttgatcatctcactcactgcaaatgtcatgtgaggtttcatggaagtattaagagatccaattaagaagaatagttctgagtctaaaccagcccagagtggcttctctaggggaaactccccgctcagctggtacgtttgtgtttgtcattagggacaccttgtatctcaggtgcctgccttcagacatctgcctgtactggcttcatgttacacacaaatccacatttaataacactcctactgttatttataggcttagttatgttaataagattgtttcaccgagttctttctcttatcctagtggctagtggttgtggaaagaggaggggttagaatgggaaatgaagtgttagtttaagggaagattaggtgttatgctatcatgcattgcttttcgcctttgtgcag

SEQ ID NO: 337 - DNA, 193 bp, Homo sapiens
  source 1..193: mol_type = genomic DNA
ggtatcctgtcttggtagtgaatggaagagggcctggtccctggggcagtgcagaaggcactttgatcatctcactcactgcaaatgtcatgtgaggtttcatggaagtattaagagatccaattaagaagaatagttctgagtctaaaccagcccagagtggcttctctaggggaaactccccgctcagctg

SEQ ID NO: 338 - DNA, 4835 bp, Homo sapiens; identical to SEQ ID NO: 336
  source 1..4835: mol_type = genomic DNA

SEQ ID NO: 339 - DNA, 187 bp, Homo sapiens
  source 1..187: mol_type = genomic DNA
gattcctcatgtccataacatgttggatgaggctctgcagctcacccccactctcagagtggtcagtctccattaattggaccccgtgatttccaatctctgctgtgttggacgtcatgagcattgcaatccctctgggagtcaccacatcagatacatcctactcagatatggctgctggatcaga

SEQ ID NO: 340 - DNA, 32765 bp, Homo sapiens
  source 1..32765: mol_type = genomic DNA
atgagcagggggaaggttattagacttcatcggcggaagcaggacaacatatcaggtgagcggaagatgggttaggtccacaatttgacataaaaatattctgtgatctgaatgttcattttaagaacccctcttggccaggcgcagtggcttacgcctgtaatctcaccacttagggaggccaaagcgggcggatcacctgaggtcgggagtttgagaccagcctgaccaacatggagaaaccccatctctactgaaaatccaaaatagccaggtgtggtggcgcatgcctgtaatcccagctacttgggaggctgaggcaggagaatcgcttgaacccgggaggcggaagttgccatgagctgagattgcgccagtgcactccagcctgggcaacaagagcaaaactccctctcaaaaaaaaaaaaaaaaaaaaaagaacccctcttacaagttcccatggtcccccagccagctcttttcacagaaagagatagaagtcctctcaagaccactgtatagttctctcattgtaaacgaaatgtgttgagaacagtttagtcctgtagcaaagtattccttgtgaacacaaaaaatatggattcctgttttaaaaattagccagtctcaaattgttatagattgagtcagcgaagcttagggactgaatacaaggggagaaataaataccatgaggaacagggtttatatgcttaatgccaatgacatagaatcttgttttcttaaggaagatgagtatttaacgttgctttacagatgataagagttaatagtggaagtaatggcttactgcatgtggggcacacctaaaagaataagctacttttaatgtacttttgaggctattagtacctgaactatgaaatcatcatttttcaggtggggatagcagtgcaacagaaagctgggatgaggagctttctccttccactgtgttgtatacagcaacacagcacacacctacaagcatcaccttaactgttagaagaaccaaacccaagaagcggaaaaagagtccagaaaagggtcgtgcagcaccaaagacgaagaaaatcaaggtatgcagggtaaaaatatcttaaatagaaattgtctgaaatagcttaaattttggagcaagaatgcaccaaaattcttttaagaagtttgatccaggtgtttgaagggccacttttgttctacttgcaaaaatcagctaatctgtgttatgtacatgtagaccaacctctcttctgccacaccatatcatcaccactggctcaaagtttcttctactccagtccccatcccaggtatgaaattccagccctacctggcacaatcccgtatgtgttgcagcctcaagtctaggcttccactatccttacagtatctccccacctctcaaccccaaagtacagtctgaaattcttgtcctggttacatgcctcatgtctttgggttgattgtttttccttgtttcaaaaaaaataaaaatcaggaaacatctcttgtatggtctaggtttcctcagtgtcatggtcactttcctgtattctcagctaaaatgtctacgggagaaacttcttctggtttgtgttctttcttccccatcacagcaactttgttgcttctaggtgacttgttcatcccttgttaaggggattggtctttgtttccttcttagtttcaaaactggtaaatctgcaactttaaagtttttttttatttactttttctcttagtatcagaggtgcatataggatttaagagatgcatgctcttccctgttaattacctagcttcacagtagaaagtattaaaattagtctcagagttcattggccttgagctacccctattcttggtaatagtttggggaattccattgtattttttacctagagaaagggggacagaatagaacactagtttgtgccttagttttagtctcagataggtataactgtcattcttggtaccaagttttgtttgttctacttgttttcctccttgggataggcatttcgagagggatcccggaagtccttgcggatgaaggtaaggggtaatcttcgctgatgctgtgttttacttcactgtgatcttgcattttggtcagcttctttcctgacattgatggtctgggaatcttggactctgcttttcattagtttgtagttgttgccattcagttttcatagagcttttctccaaagtagattttcttggccattttctgaaatattttccctttctgtaatcagccttcattgattggtttttcattcattgctttcctagggggtaagtgacatttttccaaacaaaatgaggctagtgtgttctgtcactgtgattgaactcaaccttaggagtggagtttttctggtaatgatacaggatctcttgtgcatctaccctagcactgtgtgggctttaattgcaggacgcttgtattattgataagaattactgttttctcttagcatatctgtttggtggaaaaaacttaggtaatgctagcatgtttcttaagatatcaaataaaagagtttatgaagtatgattttgtaaagaacttggagaatagagcaagtatgtggaatggtttaaaagaagtgtaaggtgctggttgattaaaaatagcttgccaaaaggagatttgattatgctgtctggtatcctcctttacgtgtgtgtgtgtgtgtgtgtgtgtgtgtataaatatatatatatgaggaaaacatgcctctcaaattattactgggggcttcaaagcatttaaatagaattaaattcaagtttatgagtattcatattcctaaatgatacaaaagcaggatctttcctattgagagttatagggcataaatattaaaatctttagtaaggccaggcgcagtagctcacgcctgtaatcctagcactttggaagaccaaggcaagtggatcacctgaggtcaggaattcaagaccagcctggccaacatggtgaaaccccatctctactaaaaataccaaaattagccaggcgtggtggcaggcacctgtagtcccagctgcttgggaggctgaggcaggagaatcgcttgaacccaggaggcagtggttgtagtgagccgagatcacgccactgcactccagcctgggcaacagagcaagactccatctcaaaaaaaaaaaaaaattcagtaaggataagctttttaggattgctttatgtgcagcaccagtgtgactggtgttagcaaagattacaggtagcactttacctaaagtttgaaggccccacttagtatctatctttaaacagacttgcacatacctgtgaaagagttgggagaggactcagagctacagagcatcagaggcctgggatgtgtcttggaagacaaatcaatcatgcctttgctggatccgtctcttgcaagtggccaagtttgctttagcttcccctttatttttgtctcatttgcttagagaggggccttttaaatagactttggaggcagataatagccctaatcctggctactaaatgcttttctcttatcaagcaactatcataacttatctccagaagctcgaaacctttcaaaagctataaactggctctaccagaaaactgcacataaaccccatattttgcttacagttttgggaggttgacagcctcacaggtgtgttaaaatttagaaaaaaaaattactagtcattttgattcttttaattctaaattgagttataaattttatgctcagaattactagtttaaaactcctccagtgatccaggtgggagccataagaattagaaaaaattatcatttggatttttaatcccagtgtcaagagcagcttccctactgaagacttaattgtaaatcagggtttctcagtcttgacactgttgacagtttggaccagataattctttgttgtggaagggactgttctgtgctttcaagatgtgaacaggatccctggtgtctacccactagatgccggtaacactcatacactcagttgagattatcaaaaatgtcttcagatattaccaaatgtcacctgggtgcaaaatttccctcaattgagaaccactactctaaacccaactgaggtagagtctctaatgccttgaaggatgggacagcagagtaaacacacagtgagattagcgaacaatggctaatactgtgacagaggcttccagaatacagtacacttatcaagtgtaagtttaacaattgccacttaaagctgggaatattgtttggacactgccagtccccctagtctgtaagctccattaagcctaaggttttgcactattcttttgcgcaactgctactgatgtcaagcaggcgatactctgattgtcagtatgttggctttaggtgtttctttagatccctttgtttattgttcagtcttttggactctagtaagaaatgtggagacaatagtgttgattttttttcttctatactcctgttccttgcagaaaggatagtagacaataatcagtcagcaacagtgatgcaaaagtggtaaaagaaagtgttatgataagcatcagtgttttctgtgccattcatagaaagtatatttaattttattgtacctgtttgcaagtttaatgtggacatggattttcaagtagctttggtactacagtgtcttttccttctaatcatcactagcatgacatcatcactgtcagtgtttgttttgttttctgatggcacttaagtcttgaacaccgtggaggagaacatgtattgggcttatgctttgtctctgtagctcaggcactgtctgcctaggaagctgttcctgagttgtagtaatcttttctcaatactgtcaccatagagggcaatggttttcctagaggagtatagcaaagtacctcctagacattttctatattctccctacctactcctctcccctcacttcacctcttcagattatttagaatgtggtaatttaaattgttgaaaatagagtgttagaaagatatactcaaataataactttttatatgggtagtaagattgggattggattaatgagattgattgattaagatcacatctaggtttagaatgaacatgtattatgaaaataataagtgatacaaaaacatgcattctcctggagaatagtcaaaaaaccagtttgggctaacacttaacacagatattcagtgagtatgaaaaatttaagcagtgataaatttgaggtctctactgttcatttgtatgaagattttcttatgaacttgatgtcagtcctttgattagaaaattgatttttatgactttaaaatggtcataaaatcacagtgatgggatgaaactatgatccagattaatttcttactttataaatggagaaactgagcttccccatttaaagaagttattcaaggtctcacctctcattggtaacaaaagcatgatagaaaccagatcctctgactcccagtccattactcttttatgccacatcaattgccaagtgataaattttctctggaaccccagcttgtcccacccccattcccaaccctctatttatgcatggactttactaacctccctgaatttgttttctacagaattctccctctgaagcacagaatttagatgagaatacaactgagggctgggaaaatcggataagactatggactgaccagtatgaagaagctttcactaatcagtacagtgcagatgtacagaacgcgcttgaacaacacctacattctagcaaggaatttgtgggcaaacctactattttagacactattaataagactgaattggcctgtaataacacagttattggttcccaaatgcaggtaagcaccaaagggttgaggactctctaagtagctgaaattttaagaacccaggaagagggtaatggattggaattactgttccttccaaatgtacaaggccatggaataacagattagccaggtgttgatcatatgtaaccaaaagtaggttatattaactggaaactacctggatacatatttttaaactacctttattaataaaaaaatagatgaattgaggctgtgtgcagtgcagtggctcactcctataatacaacactttggcaagaagccaaggtggaaggattgcttgaggccagcagttcaagaccagcctgtacaacatagtgagaccctctctttacaaaaaaaaaaaattaaaagccgttgtgatgatacacacctgtaagtcccagctactggggaggctgaggtggaaggatcacttgaatgaatttgaggttatagtaagctatgattgcaccactgcactccagcctgaatgaaagagtgagaccctggctctatttaaaaaacagagagagagatgacttagtatgggaaattctatataccctaggtaggaattatgtaatatttatagaaagttaagcatgttctttctcatctttattttagagatagagtcactgaagtcttaatcatgtattttttttttttttttaatattttcttgccgtttctggggaggcaatttcactagatgtagcatgtctcttagaaaaattgagctttcatcacattttaaaatttctcatcattgatctaaataacatgtacagataaaacctgaaaatattagcatgttttccttaattatgaagtaatttgagtgtctactaaggtgttcttgctgttgtttaatgttattgctctggttttattcagttacagctgggaagagtcactcgtgttcaaaagcaccggaagatcctgagggctgcaagagatttggctttggacactcttataatagagtatcgtgggaaagtcatgttacgacagcaatttgaggtcaatgggcatttcttcaaaaagtaagaacgtcattcattgagcagtgagggctaaggtggacctggttgaccagtgttgttgtaaaaatcattctgtttgataagacgctcttgggagaaaaaaatcacaactcagataagctcacacctgtctgctatttgtagagaagtgcaagtaaatcttcaaattgttcaatgtataaaatggtgacacctcctttccaagccaagcattccttgctttgtgcttgttctttaatcaaaagcagacaaacgtgatgctttcccaagtttaggcgttgcaaaagactgctgctgcttctctcagcatatgcttcatatttggagtcatggggtggccttcttatttgtgttgagaattacaggaattttaattgtatccctagaccatacccctttgtgctcttctactcaaaattcaatggtgtagagatgtgtgtggatgcccgtactttcggtaatgatgctcggttcatcagaagatcatgtacaccaaatgcagaggtaagatatctgtagcaacttccctttgactggaaccatcaaatgacaagcttactgaagaagcagtgtgaaaacttcactcagataaaggtctgtagataatagtcgtgatatttcatcgtgggaggtgaaaaacaaaagtaatggtgcttttatacgacaaaatgggcgcaaggaaagagttttctttagagaaggcagaaatagaaaagagcaagttagcatttgctaaggagaaaaagctagactggataagaaaatcaagtgtagttatattaaagagattgccatacggtggaagtagatgttgttaggcctaactaagctatttggttgcagtttttttagattttagtgagtaatgttttatgagaggatctagacatttctagaattcattactcagagcaaccacatcaaataaagcaagaaaatccacagagctttacttactggctaaggaattttaattctctggtggagctggaaacagctataagatgtgaaagcggctgggcgcagtggctcatgcctgtaatcccagcacttcggaaggctgaggtgggcagataacaaggtcaggagttcgagaccagcctggccaacatggtgaaaccccgtctctactaaaaaaaaatagaaaacttagccaggcattgtggcgtgtgcctgtattcccaggtactcaggaggctgagacaggagaattgcttgaacccgggaggcagaggttgccgtgagccgagatcacgccactccactccagcctgagcgacagagcaagactgtatctcaaaaaaaagatgtgaaagtagagattttaccctgatttctaacatctcaaggtttctccacatatttaagaaagtattataaattttcaagccagtgcagtataatagtttcagatgaaatgaaggggttaaataacagattaccataactccttaaataaataatagattaccataactccaaatggagagaaagtatggtttttttctctcttacggaaagttcatggtctttatgaaaaatccaaccagaagccttttcacacaggtgcgacacatgattgcagatgggatgattcacctgtgcatctatgctgtgtctgccatcaccaaggatgctgaggtcaccatagcatttgattatgagtatagtaactggtaagacctcagaaacctttcctaacaggaatatccatgtcttacatattaagctattcactctatttaaagtctgctcttgtttcttgccttttcctttgtttacttaatcttttcatgactaatgaattttctgcctagaaattgtaaaggaaaagacaggcaagattttttttagagatacggataccttgtatgatactgctcacaaatttcctgacagaagtgttttcgcttatgcctttttagcaagaatagcaaaatggatatatatgtatgtatgagacactcctggaaattacaatagcatcctgttgttatgcacagagtacttatgtcagggaccatatagaatgagaatttaggccaggcgcagtggctcacaggcctgtaatctcaacactttggaaggctgaggcgggcggatcacgaggtcaggagatcgagaccatcctggccaatgatgaaaccctgtctctactaaaaacacaaaaattagctgggcgtggcggcacacgcctgtagtcccagccacttgagaggctgaggcaggagaatcactcgaacctgagaggctgaggctgcagtaagccaagatcacgccactgcactccagcctggcaacagagggagactctgtcttaaaaaaaaagagagagaatttaatatgttacctctacttttaatttgtcaattatacccttataaagctaggggtgagatttaaagatccaccctgtccacagaaaccatgttatctagctgtatatgacagtgcagaaaaccataaagggcaattcatagatgaatatgtgggattttttaaagtatatgctttttgttctttggtcatttggggcaaaatagaggttatgtggtaaagtgatgtttggcccaggtataaggaaaaaagatgttctgcttaattcatcaaggaaaataaaaaaggttttaagaaggttataaaaggttttaagaagtagggaattagtaggtaaaagtgaggacatggtaatcgtgggcacaagatgagtatggccacatcagactttatcattgataaactgcctgctaaatagccaataaaccactggggggattgaatttagggagggctttcttttttttttcccactgaccatggagtagaattggggttacacaaagaaagacagaatattgaaagtgttacgtcaggcgcggtgactgacgcctgtaatcccagcactttgggaggctaaggctggaggatcacttgagcccaggagttcaagaccagcctagacaacatggcaaaaccccgtctctgccgaaaataaaaaaattagctgggcgtgtagtcccagctactcaggaggctgaggtaggaggatcacttgagcccaggaaacagagattaccgagagctgtgatgcaccactgcactccagcctagatgacagagcgagattccgtctccaataaaaagaaaaacaaaagtatttataggactctctaatgtctctgtttaacttattcagagacaatatcagaggaagttactgtactgatattttaagagggtgaatggataatgtaactgaatttcaagggtactgagacaggcattttggttgtttctttggagcagtaattataaagtggactgtgcctgtcacaagggaaaccggaattgtcctatacaaaaaaggaatcctaatgctacagaactgccactcctaccacctcctccaagcctacccaccattggagcagagactagacgtagaaaagcacgacggaaagagctagagatggagcagcagaatgaggcttcagaggagaataatgaccagcaatcacaagaagttccagaaaaagtaactgtatccagtgatcatgaggtaatcgcccctggtcaaatgatgatgctatggcatcaatcctccaaaggaagaggaacccgggttgccgcatggtttaagtaggggagctatagtaacacttagtgccctttatatcaatgtgggtttattgtgttcatacatttctttctgttttacaaagtcaaaaacatcctttgctggttttgcaccagagaataggggttagttatcatctgtgtttaccatgtggcctcacatgagttaacagtttaaagcactagagattgttatagagagttttaagctaccagaataaaacagattgattttttctcagagcttgagtacagctgaatattgcctctatcttaaaggaagtagacaatccagaagaaaaaccagaagaagagaaagaagaggttatagatgaccaggagaacctagctcatagcaggagggtgagtactgtctgacattactttgctccttctcattcctgctacctccatcatgtgaacctcttctgttctcttgactttgtatcatctcattgatttgacctgaaggttataatttgggctttttccgtaataaagattttattataatttttttatttatttttctctatacacacagtagttttgtagtgattattatctagtgatggtttgaagaggttgtttttttttttttttttttttttactaacaatctggtttccgctgggcgcggtggctcacgcctgtaatcccagcactttgggagggcgaggtgggcggatcacgaggtcaggagatcgagaccatcctcgctaacacggtgaaaccttgtctctactaaaaatacaaaaaattagccgggcgcggtggcgggtgcctgtagtcccagctactcgggaggctaaggcaggagaatggcatgaacctgggaggcagagcttgcagtgagtggagatagcgccactgcactccggcctgggcaaaagagcgagactccatctcaaaaaaaaaaaaaaaaaaaaaatctggtttccgaaaaactggctggtcagaatcaaaatgtattatagttggtttgctctgaattaggaattttctaggtttttgtgagttctgaagtttttttaaacccttttagtcatatgaactaaaattttctacttttatgctgaaaccaatcctgtgtgtttatgaccctgatttgatgacttttttttttttctttttgagaccgactcttgctctgtcaccaggctggagtgcagtggcgcaatctcaactcaccacaatctctgcctcccgggttcaagcaattccccttccttagcctcccaagtagctggcattacaagcatgcgccaccatgcctgggtaattttttgtattttagtagagacggagtttcaccatgttggccacgacggtctcaatctcccgacctcatgatcttcccacctcagcctcccaaagtactgggattacaggcgtgagccactgcacccatcctgtttttctttcatattaaagtttcaaaataactgaccctttttgaaaagtttatgtttgaccttgcctttatttacaactattccccacatttaaaatgaaatattttatttttaatcttctgttttccaagttatatgtgtcatcttactggtagttaaatgaatttctgtaaatttccattaaaaatacttttataaaagctatccactcgtcctcatttgaagcttccttctacaccagtactatctctttctagaccagggaagatagaaaggtagaagccatcatgcatgcttttgaaaacttagagaaaagaaagaagcggcgggatcagcccttggaacagagcaactctgatgtagagattactacaaccacctcagagactcctgttggtgaagagacaaaaactgaagcccctgaatctgaagttagcaactctgtttcaaatgttaccatcccaagcaccccacagagtgttggtgtgaatacccggaggtcttcccaagcaggggtaagagttgaaaagacttcagcacttagacatcctcacctttgctaatgtcaatacctaacttttggaatttttaaaatcagtgttttcagctttgctccatatcacaataaataaggccattaactgtttaactggaaccatttcattggcctattttataaatgcttattagaaataacgcaaacatttgtcgctagcctctttagctcatttaagtgtatacatttttgtatttaaaaattagattttaaattagtgtttctaatccttatatttttcatcagtagacattctgaatgcttaaagtgaataggaaattagactgtttgctgataaaacatttctggtaagcatctgaccctactattgctacaggatattgctgcagaaaaactagtccccaagccacctccagcaaagccttctaggccccggccgaagagtcgaatttctcggtacaggaccagttcagcccaaagactaaagcgtcagaagcaggccaatgcacagcaggcagaattgtcacaagctgccttggaagagggaggaagtaacagtttagtaactcctactgaagctggaagtctagacagttcaggagaaaacaggccattaacagggtctgacccaactgtggtgtcaattactggatcccatgtcaaccgtgctgcatctaaataccccaaaaccaaaaaggtaagtcacaaatgcatcctttataagtccagtctggcaagggctgtcttagtgaaatgagaggacctataatccctagaagaaactaatctcaatattactagattgaaagttctaaaatgctttgacacaaaaggctggagtcatcctgctacctgtttccttatttttagtcagcttaaatcactgatagctgaaattattcctctcttagtgggcgtggagagggtgaaggaagatatccttgtgttctagttgctcaattcattcttactgcagctgctgcatctcctcctgtcctagtttctagatgacgtttgtctttatgaactacactgctacctcttgatttataaactaatgatctcttttttaccttagtatctagttacagaatggttgaatgacaaagcagagaagcaagagtgccctgttgagtgccctttacgtatcacaacggatccaactgtactggcaacgaccctaaacatgttaccaggtcttatccattccccgttaatttgcaccacccccaaacactacattcgctttggctcaccctttatccctgagagacgtcgaaggccccttctgcctgatggcacattcagctcctgtaagaaggtatgtctgtgtttttgtgtgtgtgttgtgtttatgtgtgtgtgctttatttttttaagcctaagattcctatcatcatgacataaataaaatgttctctagatagccactctgcccatgtgagtttataatgagttagttgttcagccataaatactgattcatcaagagtctgtgagactgtggtggaatgaatgtactgcatttttagtgctcagatttgtgactggtcactgatgtctcttctgagaacccttgaggttcctgagtgagagcacacagcagtggatgactgggtagagacggatatgttttgtgtgtgctcttgtgatatgggttaacatgtccatttatgattattgtgtgagattaggccctgggtcctctagaacactgttgcataaatgaaaaaaattaaattgttttgaatcaattcaaccgttattatccactatcatcacttgaaggaaattagaggaaaaatcctattgtaattggcataattcctgttccttgatcaaatgacaagtcggactgtttattccaagagaatacagaatctaccctaaaagactctctttccctctctgtttctgcctctttctcctctttccagttacttactgtttttggatctagtggcagtagcgtttggtggtgtttttggaatgctctttcttaattcccagaagccctgcatattttccaaaggtgtctcttaggaatagatcactccctcagatctatgatgtcgttttccatgtttctagaagtataggacaccctttcatttggtcttcctttgaggtagagtctgttccctggaacacccttttctcttatcctcagatctggattcaggctgccttcctcagtgtctgccattgccctcctccactggcatcacgtacatgaggatgctgcatgtagattatttgatgtgatgaagtctccaactccaggcaggtcttccctgactcctccaaacttaaaagcttttctctttccccaaagaacagaagttatttctccgggggaggggggcatgaaagatgagccaaagtggtgtgggatatggaggggaggagggcaataggaatctgcaaaaaggaaggacactactgctgaatgagcagcacattgcagaaagtcttttcctaattgcacatcttacctaaacattggaatcactcattggtttgttcggggaaacgctcgtagaattcctaaagagaaatttgaccatttctaaggatgttaactgttgaagcatcttatcaagccaggtcgtacaatctcctattttggtcctttaaggagtgtaggcaattatttattacagataagtaatgaagtctgagctgcaaataatatgaactaggctcttgaattgaaattccttcttgataattctaatgctgggttgcagtctttctgtttccatcttttccaactagcagagacttaacgaaaaccaaaaacgtgtctaggactgtaacttcagatctggtagaaaatgcatttctttaagcttttttaacttggttctgcttttatacttgtatctatagcacatccttaaatttctacgggcaacagatagaaattccatttaacacaagtccctgttatattctccaagtgtatctgactatccttaatctcatttatacaggctctactcaagcacttttatctatgtgtcatggttagtctttaggaagagtttaggctgcatacacaggattatcataacaagactatttaaataggatctttaaaaactgtttaagtcattgctttattgtgtgctgttcacatatcaagattctattttttaaaatacagctttttatgaggcaaaataaaatgaaatggaatgttttagctagaatagaatttggctttatagcagtgaagaagagttcttcttctaatattggtcttcttctaatatctcctaatattggttagaaaggacttacctaatgcagaacctaagaacattttcattattcaacaaaattgtaataaaattctgaaaatccctcagagtataagttaatcagatagataagaaaaccctccatgggattatttagaacaatgtatatttctaataggctcactgtttcatatctcactaaagaggtaagggcctggccttgtaagttaaaaacttaccagtataggacaaattaaagttgtatctgtatagttgtactcagattcttatgctatttatttttatttttatcattattattctgcaacttctgaaaagaagaggagttcaggtatttgacagaacattttatgatatccctagagtttctaaattgaatcatagtttttaagaagcattttgcattttttagttcctcagttggtattttaaaaacatttataagtggccaacaaggctctcagtagtgtttcaccttgttctctctaaactcctcttctaaacacaatgtgtatagggcatttggtctccagacttcttagaaaaaccagtctgactgataatgaaacagtgtgctttgcattgataattaatatttcattttatacactggagcattatctgtaaatctccaaacatagcattgaaatttagttgaaccgggactcggtgaaaatctgctcagtgttcagtactgtactataagctttcttcacatacattatctcacttaccatgcatgaaattgggatcattgtcctaaatttatatatccagaagctttgtctcagaaatgtttggtaacttgtccaaagtgaagcagctaataagtgacacagccagatttcttctggtgggggatagtaggggttcacagggtctcactgttgtccaggctggagtgcagtggcatcatcacaggctcactgcagccttgacctcctgggctcaaatggtcctcctacctcaacctctcgtgtagctgggaccacaggcacaccaccacgcctggctaatattcatattttttgtagcgacagggttttgctgtgtttcctaggctgatctcaaactcctgagtgcaaggagtctgcccaccttggcctcacattctgctgggattacagatacgagctactgagcccagcctcacagccaagtgtcaagccagggcttctggactccaaaacctgtattgcttccttgctctttcgccataatagcgagacctttaaaatatttatccatctttgagcctcccagaaaactcctttgcaatatattttaatagaggttcagagaagggagaaatgttcttttgattttaacaacttgctgagtaggtgcatctaaaattaacttattatccatgaggttaattgtatcttgttagatacaaacaaatgtccatgttccttttttatatgagtcctgaaatattgtaaaattatacaacagaacctggaggagtaggtttgattgtatttgctgtgtttcacctcatagctaaccatggtagcatctttcttctagaatactcctgttctgattttatgttccctttttgtagtcatcagatccagaatgtaaattattttacaagtacatctactagaccctggaaatattaaaaaattactcagataggaaagcttagtgaccccaaatgagtgttttctgctttgaaaagaaaaacttaaaggtggccataacaaaagatttttcactcctgagcctaatttttccatttataaaatgagtgctttggacaagatgacttctaagttctcttctaagctttaaggctatatgtatggttctgacaattcatctttacatcattattctgtatctaagatagttcattcttcggattttttattttgtttttgtgtttgcttttcagagacctggttgtatcctaaaatgtttacgtgattcaaattaccattgagagctcttttttatatccttgttcactcttccttccaagtgtttacaggtttacagtttcagttttgctttcatttggccagccacaatgacatttgtatgatgtaagatttttttttttttttttttttttttggtaaaatttttgtggattgtttcctaggtttctaagagggaaaatctatgagaattgctctctggtgaagagagtatttacttacctgtaatacatgttctctaaaggtataaattataataattcacctttgctcttcctattgggggagggtcttactcagaaattgatgtttatcaaaattcgatctgtcttatgtcagggcaggagagccacagagtggtgagcaacctacaactgtatatcttaagagaacacaattacaggtaagaaattttctgtcttccacaggatacataatcttattatcctaatctttgcaggtttactatctggcctaaatttatttcttgtcagtttattattctaatctttactaccaaaaacttgtgactgataggtcttctttttgactttttcccttttttttgatttctactgaagctcatttcgtgatttgcattactcatgcataatttaaccaaactacttgttggaggggggagtcccataggttatttcatttgaaataaaccttttggaaacgcttttggtacctgtagtgaagagctattaatcctcatccaaaatcttccaatgaatcttttttattacctcttcacacgtctctagcacggggcagacaacttttaagagatctttatcttccttctaggcgcttattttatatattagttttattctatacgatcacagtctctcctaaataaatgttaagatttcttcctcagtcttgccattttacaccatcccaaatggtatgaaaagttgaatagcagtcattttttattggtttttgtcttttgatgggatctcattatatgtaatccagatttcctcaagtttttcagttaaaaggaattgataggacaatgttccaatatgctgagacacaagacaataaaatgcttgactgtgtaactgaattagtgtgttgaattgtatcactcaccagttgatgtacatttaaaacaggtgcactaaatagttttagataattattgataattctctggttcttttcaattatagcgctggataaaacaagccttagaagaagggatgactcaaacatcatctgtaccccaagagactagaactcagcacctataccaaagcaatgagaatagtagctcttctagtatctgcaaagacaatgcaggtacgtatctaaaacctttctgattatatgaccaatgattgtttcaggtctgcataaaaaatttaagtatgagtatttctgatacaaaaagaaatggcgtgttttctaaatagttactttacatctgtctttacagaggaagagagagatctcaagtcagggatcagttttcccaggacgacaaagaaggactagacagtgtacagataacagcagaaatggttataaaaaaggttagatacatttaaagtagtaagtttaggaaatttatattcatatttataagatggggcaagggcaagaaagtggtggaacactaatattcaggaaagaattaaaattctgagtgattaagttgggtgggacatggttgagggagcaggggatgaatgaaataagtgaaaaattattatcaattgattgttttcaaaggggcttgtataattagcatacaatttttaaaagaacagccgggcgctgtggctcgcacctgtaatcccagcactttgggaagccaaggtgggtggatcacctgaggtcaggagttcgagaccaacgtggccaacatggtgaaaccctgtctctaccaaaaatgcaaaaattagctgggtgtggtggcaggtgcctgtaatccctccctaaacaggaggctgaggcagtggagaatcacttgaacccgggaggtggaggttacagtgagccaagatcacgccactgcactccagcctgggcgacaagaatgaaactccgtctcaaaaaaaaaaaaaaaaaaaaaaaaaaaacaaattttttaagacagctttaaatctaaagtctttgtgcatttttaaactagatgtcaatgaaaaatcatctgttccattggttttgacagtgacttgcaaaggatgtaattgaaagcacttgtgatatcttaatgtattttgtgacaatctttttaccagtttctcctgcaaatatcagcttaattgaaaagttctttgtgattttcataacttttctctaaatcagttttttaaatattagacaatcaaaataccaaagtaaattagatgctaaagcaacctttcaggttgcaacaaacagaatatttcacattttcataaaaaacccacttcattgttcctgtttaccaacttgctgaataaatgtaatgaacttgaatttaattagataaatttttagtagcagatattgcaactaaaatcagaacttttcttaaagttcttacttcatttggattttacttctttttagattttatttcagaaaacgtgaattgcctttttttctttttttcttttttttttttttttttttttgaaatggagaatcaagcgattctccctgcctcagcctcccgagtaactgggattacaggcgcccgccacctcacccggcaaatttttatattttgagtagagacggggtttcaccatgttggccaggctagtctcgaactcctgacctcaggagatccgcccacctcggcttcccaaagtgctgggattacaggcatgagccaccatgcctggctgtgaattgccattttttaaattatggatttagtttattcttttgtctctagattagattatacctcataagttaccacctatatacctcaggataataaaattccagttatctgaaagataaattatactgtttatttaaaatattttcttctagtattcaccaaaaattagggatatttagtcaaatatgaatagtataaagaaatcttggtaccagatttccatttgtattatttcttttttaacagcttttaaggtgttagtaagaatataacttagctgaaatagactatcatgtttgtgtatctatctggtgtgtgtgttaatgcatgtgtatagttaaggttgggaacaggagattgcatagcagttcacatcctgactagcaaaggattataggaaaagtgtctttgttatcacatgccctggttggaaggaaattaggattcctagtcaccagccttttttgttattgttgagcttctgccctagtctaacagtgagaaacactcacaggacacaccttgcccttaaaaagcaatgtaggaaaatatttgattttaaaaatcaagcagcagtcaaatgcgcaagttatattgctacaaaattagcataaattctgaggaattacttttatttgttggctctcttttgtttttttcaagaataccaaagagacattaagaaaggggaaaggatttctataatagaaaaaatcaaacagacctttacttgaaaaccagctgtcccctttactaactatatgatgttactagaagtctctgaggctaggcgttggtggctcacacctgtaatcccagcactttgggaggccaaggtgggcggatcatctgaggtcaggagttcaagaccagcctggccaacatggtgaaaccctgtctctactaaaaatacaaaaattagctgggcctggtcacgtacctgtaatcccagctatttgggaggctgaggcaggagaattgcttgaacctggaggtggaggttgcagtgagacgagattgcgccactccactccagcctgggtgacggagggagattctgtctttaaaacttaaaaaaaaaaaaaaaaacaagtctctgagcctcatttgtaaaatgggaatagcaatacctgctttatagagctaacattagaatgaataatgtatataaagttctcaatatagtatcaggcccataagagtaattattatacggtcattattctacacagaatactctttcttgtagagtatttgtggattaataaatacattaaagattctggctgggtgtgatggctcacgcctgtaatcccagcactttgggaggctgaggcgggcagatcacgaggtgaaaagattgagaccatcctggccaacatggtgaaatcccatctctactaaaaatacaaaaaaaattagctgggcatggtggcatgcacctgtagtcccagctactcaggaggctgaggcaggaggattgcttgaacctgggaggcagaagttgcagtgagccaaggtcacgccactgcactccagcctggcaatagagtgagactccgtctcaaaaagaaagaaagaaagaaagagagggagggaagaaagaaaagagaaaagaaaagaagaaagaaatacactaaatattttaagttcctaaaagctgaaactttatagaaataaaagttattatcaaagtagggcaggggcatgatgttcattatttgtaaatgatgtgggtctattcttagaagagcctaagtaatcagctgaaaaacttagaattaataataagagtttaggccaggcgtggtggctcacgcctgtaatcccagcactttgggaggccgagatgggtggatcacaaggtcaggagatcgagaccatccttgctaacacagtgaaaccccatctctactaaaaatacaaaaaattagctgtgcgtggtggtgggcacttgtagtcccgctactcggggggctgaggcaggaaaatagcatgaacccaggaggcggaggttgcagtgagctgagatcgcgccactgcactcctgcctgggcaatagagtgagactctgtctcaaaaaatatatatatatactaataataataataagagtttattaatatcactggatagaaggataaatatataaaaagtgtaaatatattttaaaaaatcatttatataccaagaaagtaaatgaataccaattttttttgttcccaaacttaacaaaactaagaaactgcctaggaataaccttagttgggtatatggagtaaactgttactgagaaatatttttaaagtctgaggaaatggaaatttctttttctttttttttttttcatgaatcatacgtgagcctttgataaatttcatgttcattatggaaagaatatatatatgtgtatatatatatttctttctctttctctctgtctttatatagttcccatgaaactgccttgtttttggaatttgattaaatgattctgaagtctacctttaaaaaaataagaaaaaaattgaaaaaataataatgaagtactttctcttgaggtgtaagacgagcttctagtatgaagctaatagttaaatttagtataatattgatgcaagaatggatgtatatatggaacaaaatagtcagaataggcctaaatataaatgtaaaagttggtaaattgtcatggaatttttagttaggagattgaaaaagaattagaatctagctggacacggtggcacgtgcctgtaactctcaactacttgggaggctgaggtaggaggatcactcaagcccaggagtcaagttcaacctgcgcaacacagcaagaccttgtcttcaaaagaactactaggtcctttgccaaagaaaattctaggcacattcaaatatatatatttttttaattcaaacttgggcctggcatggtgactctcacctgcaatttccagctctttgggatgccaaggcagaaggatcacttgaggccaggaatttgagaccagcctgggcagcagagagagacccacatctctacaaaaaataaaaattagccaggcatgatggtgggttgcctgtagccttaaggaggctgaagtaggaggatgacttgagcccaagaatttgaggctgcagtgagctgtgataatgccactgcgttccagcctgaatgacagcaagacatctgtctctaaaaataataaaataaataattcaaactgtattaaccatgtttttgtgtctatactgcctctgtattaatagaggattagtacattggggaaaggatttgcagtaaaactgccggggagtaatatccctgctagcaatctgataaaatttatcatgtgcattaaaaatattcataatccttaacctagtagtcgttcatttgttctgcttggtatctttcctacagaaatagacaaagaaaccaaaatttatatataaggttggtgcaaaagtaattgcgtttttggaccattaattttaaatcactgtaactagactcagacacatctttattaatcaaaataggaaccactgcaatcaacacatttttgccactgagaaataagtttgtttattcctgtagcctaaaaatctatgcttcaggattcgacaaactcttggaaaatattttctgcatcctgctggttgtggaagcaccttccctgtaaaaagttgtcagatgcttgaagtggtacctggttggcgagaggtcaggtgaacatggcgggtgagacgaaactctgtagtcaaatttgttcagcagcttcagaagttgaatgaattgtttattagaataattaattcttagttattaacaattgcaaaaactataggttaaaaataatctgaattccaaccccaggaatggtagaatttgtaattttatctgcttgtgcacatacttgtaatggagtatcatatactatttattgaaaatcttatttttgattcattttatcaaattaactccctctacccccaaaaacagcgtagtaccacttttgaattagatttgtgatcttacctagcaccttgaatttgtaagaatattaaaagaatagccaggtgtggtggctcacgcctgtaatcccagcactttgggaggccgaggcaggcggatcacgaggtcaggagatccagaccatcctggctaacacggcgaaaccccgtctctactaaaaatacaacaacaacaacaaaaaaaaaaaccgggcatagtggcaggcgcctgtaatcccagctactcgccactgcactccagcctgggcgacagcgagactccatcaaaaaaaaaaaaaaaaaagaatattaaaagaagaatatacgatgactaaggttccttctaggaatgtaaggatgagttaatatttgaaaatttaataatcgtcatttgttagcaggtcaaatgggggaggagaagtcataacacagtgacttttatcaatttaatgataaaataacatactatgatcttttaatatctagctgaaaaattgccagttgtcatgcatcatgaaaactagttaaacatcaaaataggctatcaaattatcccactattaccattattatttaatatagtctaagtaattgttagccaaagtaattacaccaaccccctcccccccacaaaaaaaatcaacataagagatataagtactggtaaagagggttaatgtgttatcatgtacaaatactattatctacctagagagttaattgaaaaactggtagagattaatagggtaactggataaaaaataagtatgtaaactttttaaatgttaataacatttagataacaaagggagagatacgttttattcatagtagtaaaaaaaaaaaactaaagaactctggagagtaaacttaattagacatgtggtatatatagatgaagagggacataatatgtgaataacaaagattatgccatgttcctgggtaagaatgcttctcaaattactcctgaatttcatctaacaccaatcaaaatcctaacttttttttttttttttaatagtatgagcatggtcattgaatgacttctatagttcattgctagaatagctaaaatattttggagaactagaacagaataactggaatttccctaacaattttaataaaaagtatgctggtgttgattcagtattggacaataagtggaaagaataacattcggaaataaacattcagaagataagcccagtatatgtaagaatctaataagataaatatatttcaaattaatagggaaattatagttattctacatttacagaagattttggaagaaggtgctggctatttgttatggggaaaggatggattaattgctaccccatatttaagtatgttcttttttccttttttgtaatggcagtttgtcagtgtgaaataaaatgttcttttttaattaaaatctaaattaaaaattaaacatggagacaaaaggaaaataggctggcatttttacagtgtcagggtgggttagcaaagacatgatatcagaagcagaaaataaagtgatccgtttgactaaatagaaacaaaacatatagcagagacttgtaaataaaattgaaggcaatcagtaaactgggaaaatacatttgtaattttattgacaaggggtcaacattcttactatttaaagagcccttacagatgaagaaaaagaccccaacacctcagtagaatgcaggctgaagaacatgagccagcagttctcacaggactaaatataaactacacatatatagatattcttttgatttaataatcctacatgtagccatttgttctaatagcaaaaaatgaaaaaaaagttggttaaattttgataatactaatgttgtgcagtcattaaacctgaactgtagatttctattcattgtcataaaatgttgaccatgtatttctgagtgaaaatagttactgagtagtttaggtaaggcaagagtcagtgaagcaatgtctcgataaaaatttaccaggatattagcatgcgtttatttgtggatatgattttcaggttgtgtatgtgctgtataaccttggtaattttttgagtaaaggtgaaaaataataataataaaagatggatagatttgaccacataaaatttggaaactatatatgcaggaaaaagagaaaaagtaggcaaatgacttggctttctttggcctgtaaacttcttaagggcagacatcaggtctcttgttgaatacagtatcataataagtactcagtaaatatatgttgaatgaatgccttgtacattgatttgcacgtggcagatttcacctgtatcttataactcctttctacaactaacttcatcacttaacataattgactttgatagttatagtgttggacctagcagtacagagatctgtaagattccattgtttaagacccttgaaatattaaatatataaaagttattccgaatataagccatgaattacatgtttgtttctgttttatacctaggcactttttaaaaggaggaaagaaaatttagtatctggaacaaaaggaagatgtgaatatacttccaatctaggaatattaaaaatcctgagatatcagaaaggaaaaatatgcatcttcaataattttttgcatttattcttccctcttcatctaaacatctcctaccctagtttagtgcctcataattctttgctaactactgtgttaactccagatggtttcccagttactagtctcatactgaccattgcttccagataatcttcctggcccaaaaattttccttgaaggcctggaataaatgtcactccttccatccaccaagccttggggatatactttaacctattgattaagaatatagatagatggagccaggcgcggtggctcacgcctgtaatcccagcactttgggaggccgaggcgggtggatcacgaggtcaagagatcaagaccatcctggccaacatggtgaaaccccgtctctactaaaaatacaaaaaattagccgggtgtggtagcgagcacctgtagtcccagctactcgggaggctgaggcaggagaatggtgtgaacctgggaggcggaccttgcagtgagccgagatcgtgccgctgcactccagcctaggtgacagagcaagagtccgtctcaaaaaaaaaaaaaaagaaaaaaagaatatagatagatggggccaggcgtggtggctcatggctgtaatcccaacactttgggaggctcaggtgggtggatcacttgaggtcaggaattcaaggccaacatggtgaaaccctgtctctactaaaaatacaaaaattaagaatgtagatatatgggagcaagaatacctgttttgtctctctccacacatcaagtttctcacctttaatatggggatgataataatagtgcttgatttatagagttgttaaaattagatatttcacaataaagcacatggcatagtctgtggtatataatcatcatttagaaaatacagcttttttttttttttaactaacacatagcaatatgatcacctttcttgatcatgctaatactaatgtgttcactttttttgttgtgtcgttttgttttgttttgagacagtctcctccctctgtcacccaggctagagtacagtggtgcagtctcaactcgctgcaacctctgcctcctgggttcaagtgattcttgtgcctccacctcctgagtaactggaactgcaggcatgcaccaccactcctgcttaatcttttttgtgtatttagtagagacagggttttgccatattggccaggctggtctcaaactcctggcttaagtgatctgcctgcctcagcctcccaaagtgctgggattataggcatgagccaccacacctggccctgtttctatttcttacaaattttaagcctcttgaaaatagaatgtatgatgaccatttttcccttcatacctagttcagtaatcagtaggtattaaatatatatacttttaactgtaaatgaataaaactgtatttttattctgagaatcaagtgagaaaggtgctttgacctaaatggtcactaaaatatttagtgtagtgacttgctttttaagtggatctaagaagtacagaaaataggattattctagtcaaaaagaatgtgaacctaattttttaatggttgggagaagtttttgtagaaatcatttcatgctttttaggtagaaaaggggctagacatggatcaaggaatcatataagaatagaaagagcttctgaaaagggacacacatatataagagatggtgaaaggaatttggatttagcatcccagtacctttagttggtgatatagcagtttagtagagggtaactgtaacacagtaacaaagacttttcagaaactcaatgtaaaagaaagaactgtagcagtggctcacgcctgtaatcccaacacttggggcgtctaaggcgggcagatcacctgaagtcaggagttgaagaccagcctggcaaacgtggtgaaatgccatctctactaaaaatacaaaaattagccaggtgtagtggtgcatgcctgtaatcccagctactcgggaggctgaggcaggtgaatcacttgaacccgggagacggaggttgcagtgagctaagtaaatgccattgcactccagccttagcgacagagcaaggctctgtctcataaataaataaatgaataaatgaaagaattttatattttgcactggtagaaattaaattagagatcagtcacatttgatttacctggagtttgggagatagaatgttttcagagttattttaagcatggtaattaaagagtttctttgggattttggttggattggaggagataacttaatgggatgaggcagaaaacagttaagagccattgtagattacagattaatggctttactgtagagccttaaattaatctgtggtttcaaactctcatccaagctttgtgtttcacagacttgttgagcccattaaagaaatggaagtctcgctatctgatggagcagaatgtcaccaagttacttcggcctctgtctccagtcacaccaccccctcccaattcaggctcaaagagtccccagctggccacacctggctcatctcacccaggagaagaggagtgtcgaaatggatacagcctcatgttttcaccagtcacatctcttactactgctagtcgctgcaacactcctctacagtttgaggtgatttgggtttggttgctgggagtgctggatatgaaaatcatcatttgtaccttctcatttcaaatataataccattccaaatgtttctttactatctttcttccccatctcagtaagagaatgggaaacctcagggtcattgtggcctgttacctggtagcctctcatcttggcagcccctatgcttcccaaaataggcatactgctaccacaaatcccattcatgtatcttttgcatgcagtccatcaatctccataagtttaggtagtaagcatgctagatctccatcgttatctttactgtatactttggtcaaaataggcctctagctgcctgtagtatctgttagtaacactagcctgagagcacagatgatattgattgattgtgtcttcgtttctaggcctttaaataagtgaagtgtctttcccaggttgtttggtattttcattgtggccttagcagagatttagaaaacattggggtatggcttatggcgaatgtgggttttttccactccaggttactttccctctttgttataatgtcttaggaatcagaagtagacaagaggctagcaacatgtattcatgagacaaatttattaccttcactgttggattaagttagaaatgtctgcctcagctgtttcaaaaagtaatcttgaatcactttagtgttcaggtttgggtgacagcaggtttcaatagaatccatgtatacttttttaaaacacttcatctattgcatgttactttgatttgtaattaaaatggacactgtctcttttttccttctcagaaaaatttgttctgaccactaaacacactctgctgctctgcccccttgtttgcacttctccagatgtgttttttgagaaaggtgaacattttaaccaatcttacgtttcctattcagcttttccaagtatgaggattcagaatacttagcttttatgagtaactaagaggcagctagcaacattgaaagcagaactgtattctttcttaccctagacctctacttttggagcagacctctttctgggtgagggaaaaaacctcctggttacatatcagttatctagggaaattactctttaccagattatttatgaaattctttcagccagataataaagcagctgattcaggcctttctaacttgactttgtctacttgcaattgactttgcagtttgcacctagagctttatagtaaggtatcatgagaggaattctccctggagggcataagattataggaatagagtgtcatactttatcaatacaggttttattataaatgtggaattatgaaaattagaaggaggccgggcgcagtggctcacacctataatcccatcactttgggaggctgaggcaggcggatcacgaggtcagtagatcaagaccatcctggctaacgtggtgaaaccccgtctctactaaaaatacaaaatattagccgggcgtggtagtgggcgcctgtagtcccagctactcgggaggctgaggcaggagaatggcgtgaacccgggaggcggagcttgcagtgagccgagatcgcgccattgcactccagcctgggcaacagagcaagactccgtctcaaaaaaaaaaaaaaaaaaaaaagaaaatcagaaggtaagtcactttgcaaaacaagcgggttcagtactcagtgtgttccttatcccttgtagcatttgggataactattaaacactgcaaatataaagtggttttggttttgttttgttttgttttttttaattggtgatcattttaataatacagtccatgcataatgttagaataccaggagggaaggaaaatattaaatagtaaaaggtccaaggcatggtttcacttgcaatttaaggaaattttacctttctcatcaataatagaacagatttcaccaccctgacccattctaatcaccattttaatggccatactctttgctgtattctagtacagagaggtggggagccttttttgtagcaaaggctgtgacacattgtgaaatatcaaaaaggtgtcacgtataaagaccagcttaggctgggcatggtggctcacacctgtaatcacagtgctttggaaggctgaggcaggaggattgcttgaggccaggggtttgagaccagcctgggtaacatcgtgagaccacatttctgcaaaaataaaatacaaaacttagccaggtgtagtggcatatacctgtagtcccagctacttgggaggctgaagcaggaagatcacttaagaccaggagtttaagactgcagtgagccattattgtgccactacatgccagcctgggcaacagtgagatcccatctctaaaaataatttaaagaccagcttaggccaggtacagtggcacacacctgtaatcccagctactcgggaggccaaggcaaaggaattgcttgagcctgggaggttgcagggagccaagactgcgccactgcattccacattccagcctgggcaacagagggagactctctctcaaaaaaaaaaaaaaaaaaaaaaaaacaaccttactagattagtttggggaaggatatttttgagaaggaaaaaagcattcaggaaaatggtgagaagtcttaagtgctaaggggaagaaggtaagaagataaacagtggaagagaacaagatcttcaggaggggaaagcatctagaaagaagagtggaagcaacattgggaggacaagcttagttagcctctcctttctaccagaataaccctcccctcctattcttgccctgagagccatactccacccgccatttcacacatacgtgcacctagatgtacaccacccactgtccatgccaagtaaaattcacagccaaaaccctgctttgctgaagcagcctcatttcccctacctcagca

SEQ ID NO: 341 - DNA, 32765 bp, Homo sapiens
  source 1..32765: mol_type = genomic DNA
tgtagagatgtgtgtggatgcccgtactttcggtaatgatgctcggttcatcagaagatcatgtacaccaaatgcagaggtaagatatctgtagcaacttccctttgactggaaccatcaaatgacaagcttactgaagaagcagtgtgaaaacttcactcagataaaggtctgtagataatagtcgtgatatttcatcgtgggaggtgaaaaacaaaagtaatggtgcttttatacgacaaaatgggcgcaaggaaagagttttctttagagaaggcagaaatagaaaagagcaagttagcatttgctaaggagaaaaagctagactggataagaaaatcaagtgtagttatattaaagagattgccatacggtggaagtagatgttgttaggcctaactaagctatttggttgcagtttttttagattttagtgagtaatgttttatgagaggatctagacatttctagaattcattactcagagcaaccacatcaaataaagcaagaaaatccacagagctttacttactggctaaggaattttaattctctggtggagctggaaacagctataagatgtgaaagcggctgggcgcagtggctcatgcctgtaatcccagcacttcggaaggctgaggtgggcagataacaaggtcaggagttcgagaccagcctggccaacatggtgaaaccccgtctctactaaaaaaaaatagaaaacttagccaggcattgtggcgtgtgcctgtattcccaggtactcaggaggctgagacaggagaattgcttgaacccgggaggcagaggttgccgtgagccgagatcacgccactccactccagcctgagcgacagagcaagactgtatctcaaaaaaaagatgtgaaagtagagattttaccctgatttctaacatctcaaggtttctccacatatttaagaaagtattataaattttcaagccagtgcagtataatagtttcagatgaaatgaaggggttaaataacagattaccataactccttaaataaataatagattaccataactccaaatggagagaaagtatggtttttttctctcttacggaaagttcatggtctttatgaaaaatccaaccagaagccttttcacacaggtgcgacacatgattgcagatgggatgattcacctgtgcatctatgctgtgtctgccatcaccaaggatgctgaggtcaccatagcatttgattatgagtatagtaactggtaagacctcagaaacctttcctaacaggaatatccatgtcttacatattaagctattcactctatttaaagtctgctcttgtttcttgccttttcctttgtttacttaatcttttcatgactaatgaattttctgcctagaaattgtaaaggaaaagacaggcaagattttttttagagatacggataccttgtatgatactgctcacaaatttcctgacagaagtgttttcgcttatgcctttttagcaagaatagcaaaatggatatatatgtatgtatgagacactcctggaaattacaatagcatcctgttgttatgcacagagtacttatgtcagggaccatatagaatgagaatttaggccaggcgcagtggctcacaggcctgtaatctcaacactttggaaggctgaggcgggcggatcacgaggtcaggagatcgagaccatcctggccaatgatgaaaccctgtctctactaaaaacacaaaaattagctgggcgtggcggcacacgcctgtagtcccagccacttgagaggctgaggcaggagaatcactcgaacctgagaggctgaggctgcagtaagccaagatcacgccactgcactccagcctggcaacagagggagactctgtcttaaaaaaaaagagagagaatttaatatgttacctctacttttaatttgtcaattatacccttataaagctaggggtgagatttaaagatccaccctgtccacagaaaccatgttatctagctgtatatgacagtgcagaaaaccataaagggcaattcatagatgaatatgtgggattttttaaagtatatgctttttgttctttggtcatttggggcaaaatagaggttatgtggtaaagtgatgtttggcccaggtataaggaaaaaagatgttctgcttaattcatcaaggaaaataaaaaaggttttaagaaggttataaaaggttttaagaagtagggaattagtaggtaaaagtgaggacatggtaatcgtgggcacaagatgagtatggccacatcagactttatcattgataaactgcctgctaaatagccaataaaccactggggggattgaatttagggagggctttcttttttttttcccactgaccatggagtagaattggggttacacaaagaaagacagaatattgaaagtgttacgtcaggcgcggtgactgacgcctgtaatcccagcactttgggaggctaaggctggaggatcacttgagcccaggagttcaagaccagcctagacaacatggcaaaaccccgtctctgccgaaaataaaaaaattagctgggcgtgtagtcccagctactcaggaggctgaggtaggaggatcacttgagcccaggaaacagagattaccgagagctgtgatgcaccactgcactccagcctagatgacagagcgagattccgtctccaataaaaagaaaaacaaaagtatttataggactctctaatgtctctgtttaacttattcagagacaatatcagaggaagttactgtactgatattttaagagggtgaatggataatgtaactgaatttcaagggtactgagacaggcattttggttgtttctttggagcagtaattataaagtggactgtgcctgtcacaagggaaaccggaattgtcctatacaaaaaaggaatcctaatgctacagaactgccactcctaccacctcctccaagcctacccaccattggagcagagactagacgtagaaaagcacgacggaaagagctagagatggagcagcagaatgaggcttcagaggagaataatgaccagcaatcacaagaagttccagaaaaagtaactgtatccagtgatcatgaggtaatcgcccctggtcaaatgatgatgctatggcatcaatcctccaaaggaagaggaacccgggttgccgcatggtttaagtaggggagctatagtaacacttagtgccctttatatcaatgtgggtttattgtgttcatacatttctttctgttttacaaagtcaaaaacatcctttgctggttttgcaccagagaataggggttagttatcatctgtgtttaccatgtggcctcacatgagttaacagtttaaagcactagagattgttatagagagttttaagctaccagaataaaacagattgattttttctcagagcttgagtacagctgaatattgcctctatcttaaaggaagtagacaatccagaagaaaaaccagaagaagagaaagaagaggttatagatgaccaggagaacctagctcatagcaggagggtgagtactgtctgacattactttgctccttctcattcctgctacctccatcatgtgaacctcttctgttctcttgactttgtatcatctcattgatttgacctgaaggttataatttgggctttttccgtaataaagattttattataatttttttatttatttttctctatacacacagtagttttgtagtgattattatctagtgatggtttgaagaggttgtttttttttttttttttttttttactaacaatctggtttccgctgggcgcggtggctcacgcctgtaatcccagcactttgggagggcgaggtgggcggatcacgaggtcaggagatcgagaccatcctcgctaacacggtgaaaccttgtctctactaaaaatacaaaaaattagccgggcgcggtggcgggtgcctgtagtcccagctactcgggaggctaaggcaggagaatggcatgaacctgggaggcagagcttgcagtgagtggagatagcgccactgcactccggcctgggcaaaagagcgagactccatctcaaaaaaaaaaaaaaaaaaaaaatctggtttccgaaaaactggctggtcagaatcaaaatgtattatagttggtttgctctgaattaggaattttctaggtttttgtgagttctgaagtttttttaaacccttttagtcatatgaactaaaattttctacttttatgctgaaaccaatcctgtgtgtttatgaccctgatttgatgacttttttttttttctttttgagaccgactcttgctctgtcaccaggctggagtgcagtggcgcaatctcaactcaccacaatctctgcctcccgggttcaagcaattccccttccttagcctcccaagtagctggcattacaagcatgcgccaccatgcctgggtaattttttgtattttagtagagacggagtttcaccatgttggccacgacggtctcaatctcccgacctcatgatcttcccacctcagcctcccaaagtactgggattacaggcgtgagccactgcacccatcctgtttttctttcatattaaagtttcaaaataactgaccctttttgaaaagtttatgtttgaccttgcctttatttacaactattccccacatttaaaatgaaatattttatttttaatcttctgttttccaagttatatgtgtcatcttactggtagttaaatgaatttctgtaaatttccattaaaaatacttttataaaagctatccactcgtcctcatttgaagcttccttctacaccagtactatctctttctagaccagggaagatagaaaggtagaagccatcatgcatgcttttgaaaacttagagaaaagaaagaagcggcgggatcagcccttggaacagagcaactctgatgtagagattactacaaccacctcagagactcctgttggtgaagagacaaaaactgaagcccctgaatctgaagttagcaactctgtttcaaatgttaccatcccaagcaccccacagagtgttggtgtgaatacccggaggtcttcccaagcaggggtaagagttgaaaagacttcagcacttagacatcctcacctttgctaatgtcaatacctaacttttggaatttttaaaatcagtgttttcagctttgctccatatcacaataaataaggccattaactgtttaactggaaccatttcattggcctattttataaatgcttattagaaataacgcaaacatttgtcgctagcctctttagctcatttaagtgtatacatttttgtatttaaaaattagattttaaattagtgtttctaatccttatatttttcatcagtagacattctgaatgcttaaagtgaataggaaattagactgtttgctgataaaacatttctggtaagcatctgaccctactattgctacaggatattgctgcagaaaaactagtccccaagccacctccagcaaagccttctaggccccggccgaagagtcgaatttctcggtacaggaccagttcagcccaaagactaaagcgtcagaagcaggccaatgcacagcaggcagaattgtcacaagctgccttggaagagggaggaagtaacagtttagtaactcctactgaagctggaagtctagacagttcaggagaaaacaggccattaacagggtctgacccaactgtggtgtcaattactggatcccatgtcaaccgtgctgcatctaaataccccaaaaccaaaaaggtaagtcacaaatgcatcctttataagtccagtctggcaagggctgtcttagtgaaatgagaggacctataatccctagaagaaactaatctcaatattactagattgaaagttctaaaatgctttgacacaaaaggctggagtcatcctgctacctgtttccttatttttagtcagcttaaatcactgatagctgaaattattcctctcttagtgggcgtggagagggtgaaggaagatatccttgtgttctagttgctcaattcattcttactgcagctgctgcatctcctcctgtcctagtttctagatgacgtttgtctttatgaactacactgctacctcttgatttataaactaatgatctcttttttaccttagtatctagttacagaatggttgaatgacaaagcagagaagcaagagtgccctgttgagtgccctttacgtatcacaacggatccaactgtactggcaacgaccctaaacatgttaccaggtcttatccattccccgttaatttgcaccacccccaaacactacattcgctttggctcaccctttatccctgagagacgtcgaaggccccttctgcctgatggcacattcagctcctgtaagaaggtatgtctgtgtttttgtgtgtgtgttgtgtttatgtgtgtgtgctttatttttttaagcctaagattcctatcatcatgacataaataaaatgttctctagatagccactctgcccatgtgagtttataatgagttagttgttcagccataaatactgattcatcaagagtctgtgagactgtggtggaatgaatgtactgcatttttagtgctcagatttgtgactggtcactgatgtctcttctgagaacccttgaggttcctgagtgagagcacacagcagtggatgactgggtagagacggatatgttttgtgtgtgctcttgtgatatgggttaacatgtccatttatgattattgtgtgagattaggccctgggtcctctagaacactgttgcataaatgaaaaaaattaaattgttttgaatcaattcaaccgttattatccactatcatcacttgaaggaaattagaggaaaaatcctattgtaattggcataattcctgttccttgatcaaatgacaagtcggactgtttattccaagagaatacagaatctaccctaaaagactctctttccctctctgtttctgcctctttctcctctttccagttacttactgtttttggatctagtggcagtagcgtttggtggtgtttttggaatgctctttcttaattcccagaagccctgcatattttccaaaggtgtctcttaggaatagatcactccctcagatctatgatgtcgttttccatgtttctagaagtataggacaccctttcatttggtcttcctttgaggtagagtctgttccctggaacacccttttctcttatcctcagatctggattcaggctgccttcctcagtgtctgccattgccctcctccactggcatcacgtacatgaggatgctgcatgtagattatttgatgtgatgaagtctccaactccaggcaggtcttccctgactcctccaaacttaaaagcttttctctttccccaaagaacagaagttatttctccgggggaggggggcatgaaagatgagccaaagtggtgtgggatatggaggggaggagggcaataggaatctgcaaaaaggaaggacactactgctgaatgagcagcacattgcagaaagtcttttcctaattgcacatcttacctaaacattggaatcactcattggtttgttcggggaaacgctcgtagaattcctaaagagaaatttgaccatttctaaggatgttaactgttgaagcatcttatcaagccaggtcgtacaatctcctattttggtcctttaaggagtgtaggcaattatttattacagataagtaatgaagtctgagctgcaaataatatgaactaggctcttgaattgaaattccttcttgataattctaatgctgggttgcagtctttctgtttccatcttttccaactagcagagacttaacgaaaaccaaaaacgtgtctaggactgtaacttcagatctggtagaaaatgcatttctttaagcttttttaacttggttctgcttttatacttgtatctatagcacatccttaaatttctacgggcaacagatagaaattccatttaacacaagtccctgttatattctccaagtgtatctgactatccttaatctcatttatacaggctctactcaagcacttttatctatgtgtcatggttagtctttaggaagagtttaggctgcatacacaggattatcataacaagactatttaaataggatctttaaaaactgtttaagtcattgctttattgtgtgctgttcacatatcaagattctattttttaaaatacagctttttatgaggcaaaataaaatgaaatggaatgttttagctagaatagaatttggctttatagcagtgaagaagagttcttcttctaatattggtcttcttctaatatctcctaatattggttagaaaggacttacctaatgcagaacctaagaacattttcattattcaacaaaattgtaataaaattctgaaaatccctcagagtataagttaatcagatagataagaaaaccctccatgggattatttagaacaatgtatatttctaataggctcactgtttcatatctcactaaagaggtaagggcctggccttgtaagttaaaaacttaccagtataggacaaattaaagttgtatctgtatagttgtactcagattcttatgctatttatttttatttttatcattattattctgcaacttctgaaaagaagaggagttcaggtatttgacagaacattttatgatatccctagagtttctaaattgaatcatagtttttaagaagcattttgcattttttagttcctcagttggtattttaaaaacatttataagtggccaacaaggctctcagtagtgtttcaccttgttctctctaaactcctcttctaaacacaatgtgtatagggcatttggtctccagacttcttagaaaaaccagtctgactgataatgaaacagtgtgctttgcattgataattaatatttcattttatacactggagcattatctgtaaatctccaaacatagcattgaaatttagttgaaccgggactcggtgaaaatctgctcagtgttcagtactgtactataagctttcttcacatacattatctcacttaccatgcatgaaattgggatcattgtcctaaatttatatatccagaagctttgtctcagaaatgtttggtaacttgtccaaagtgaagcagctaataagtgacacagccagatttcttctggtgggggatagtaggggttcacagggtctcactgttgtccaggctggagtgcagtggcatcatcacaggctcactgcagccttgacctcctgggctcaaatggtcctcctacctcaacctctcgtgtagctgggaccacaggcacaccaccacgcctggctaatattcatattttttgtagcgacagggttttgctgtgtttcctaggctgatctcaaactcctgagtgcaaggagtctgcccaccttggcctcacattctgctgggattacagatacgagctactgagcccagcctcacagccaagtgtcaagccagggcttctggactccaaaacctgtattgcttccttgctctttcgccataatagcgagacctttaaaatatttatccatctttgagcctcccagaaaactcctttgcaatatattttaatagaggttcagagaagggagaaatgttcttttgattttaacaacttgctgagtaggtgcatctaaaattaacttattatccatgaggttaattgtatcttgttagatacaaacaaatgtccatgttccttttttatatgagtcctgaaatattgtaaaattatacaacagaacctggaggagtaggtttgattgtatttgctgtgtttcacctcatagctaaccatggtagcatctttcttctagaatactcctgttctgattttatgttccctttttgtagtcatcagatccagaatgtaaattattttacaagtacatctactagaccctggaaatattaaaaaattactcagataggaaagcttagtgaccccaaatgagtgttttctgctttgaaaagaaaaacttaaaggtggccataacaaaagatttttcactcctgagcctaatttttccatttataaaatgagtgctttggacaagatgacttctaagttctcttctaagctttaaggctatatgtatggttctgacaattcatctttacatcattattctgtatctaagatagttcattcttcggattttttattttgtttttgtgtttgcttttcagagacctggttgtatcctaaaatgtttacgtgattcaaattaccattgagagctcttttttatatccttgttcactcttccttccaagtgtttacaggtttacagtttcagttttgctttcatttggccagccacaatgacatttgtatgatgtaagatttttttttttttttttttttttttggtaaaatttttgtggattgtttcctaggtttctaagagggaaaatctatgagaattgctctctggtgaagagagtatttacttacctgtaatacatgttctctaaaggtataaattataataattcacctttgctcttcctattgggggagggtcttactcagaaattgatgtttatcaaaattcgatctgtcttatgtcagggcaggagagccacagagtggtgagcaacctacaactgtatatcttaagagaacacaattacaggtaagaaattttctgtcttccacaggatacataatcttattatcctaatctttgcaggtttactatctggcctaaatttatttcttgtcagtttattattctaatctttactaccaaaaacttgtgactgataggtcttctttttgactttttcccttttttttgatttctactgaagctcatttcgtgatttgcattactcatgcataatttaaccaaactacttgttggaggggggagtcccataggttatttcatttgaaataaaccttttggaaacgcttttggtacctgtagtgaagagctattaatcctcatccaaaatcttccaatgaatcttttttattacctcttcacacgtctctagcacggggcagacaacttttaagagatctttatcttccttctaggcgcttattttatatattagttttattctatacgatcacagtctctcctaaataaatgttaagatttcttcctcagtcttgccattttacaccatcccaaatggtatgaaaagttgaatagcagtcattttttattggtttttgtcttttgatgggatctcattatatgtaatccagatttcctcaagtttttcagttaaaaggaattgataggacaatgttccaatatgctgagacacaagacaataaaatgcttgactgtgtaactgaattagtgtgttgaattgtatcactcaccagttgatgtacatttaaaacaggtgcactaaatagttttagataattattgataattctctggttcttttcaattatagcgctggataaaacaagccttagaagaagggatgactcaaacatcatctgtaccccaagagactagaactcagcacctataccaaagcaatgagaatagtagctcttctagtatctgcaaagacaatgcaggtacgtatctaaaacctttctgattatatgaccaatgattgtttcaggtctgcataaaaaatttaagtatgagtatttctgatacaaaaagaaatggcgtgttttctaaatagttactttacatctgtctttacagaggaagagagagatctcaagtcagggatcagttttcccaggacgacaaagaaggactagacagtgtacagataacagcagaaatggttataaaaaaggttagatacatttaaagtagtaagtttaggaaatttatattcatatttataagatggggcaagggcaagaaagtggtggaacactaatattcaggaaagaattaaaattctgagtgattaagttgggtgggacatggttgagggagcaggggatgaatgaaataagtgaaaaattattatcaattgattgttttcaaaggggcttgtataattagcatacaatttttaaaagaacagccgggcgctgtggctcgcacctgtaatcccagcactttgggaagccaaggtgggtggatcacctgaggtcaggagttcgagaccaacgtggccaacatggtgaaaccctgtctctaccaaaaatgcaaaaattagctgggtgtggtggcaggtgcctgtaatccctccctaaacaggaggctgaggcagtggagaatcacttgaacccgggaggtggaggttacagtgagccaagatcacgccactgcactccagcctgggcgacaagaatgaaactccgtctcaaaaaaaaaaaaaaaaaaaaaaaaaaaacaaattttttaagacagctttaaatctaaagtctttgtgcatttttaaactagatgtcaatgaaaaatcatctgttccattggttttgacagtgacttgcaaaggatgtaattgaaagcacttgtgatatcttaatgtattttgtgacaatctttttaccagtttctcctgcaaatatcagcttaattgaaaagttctttgtgattttcataacttttctctaaatcagttttttaaatattagacaatcaaaataccaaagtaaattagatgctaaagcaacctttcaggttgcaacaaacagaatatttcacattttcataaaaaacccacttcattgttcctgtttaccaacttgctgaataaatgtaatgaacttgaatttaattagataaatttttagtagcagatattgcaactaaaatcagaacttttcttaaagttcttacttcatttggattttacttctttttagattttatttcagaaaacgtgaattgcctttttttctttttttcttttttttttttttttttttttgaaatggagaatcaagcgattctccctgcctcagcctcccgagtaactgggattacaggcgcccgccacctcacccggcaaatttttatattttgagtagagacggggtttcaccatgttggccaggctagtctcgaactcctgacctcaggagatccgcccacctcggcttcccaaagtgctgggattacaggcatgagccaccatgcctggctgtgaattgccattttttaaattatggatttagtttattcttttgtctctagattagattatacctcataagttaccacctatatacctcaggataataaaattccagttatctgaaagataaattatactgtttatttaaaatattttcttctagtattcaccaaaaattagggatatttagtcaaatatgaatagtataaagaaatcttggtaccagatttccatttgtattatttcttttttaacagcttttaaggtgttagtaagaatataacttagctgaaatagactatcatgtttgtgtatctatctggtgtgtgtgttaatgcatgtgtatagttaaggttgggaacaggagattgcatagcagttcacatcctgactagcaaaggattataggaaaagtgtctttgttatcacatgccctggttggaaggaaattaggattcctagtcaccagccttttttgttattgttgagcttctgccctagtctaacagtgagaaacactcacaggacacaccttgcccttaaaaagcaatgtaggaaaatatttgattttaaaaatcaagcagcagtcaaatgcgcaagttatattgctacaaaattagcataaattctgaggaattacttttatttgttggctctcttttgtttttttcaagaataccaaagagacattaagaaaggggaaaggatttctataatagaaaaaatcaaacagacctttacttgaaaaccagctgtcccctttactaactatatgatgttactagaagtctctgaggctaggcgttggtggctcacacctgtaatcccagcactttgggaggccaaggtgggcggatcatctgaggtcaggagttcaagaccagcctggccaacatggtgaaaccctgtctctactaaaaatacaaaaattagctgggcctggtcacgtacctgtaatcccagctatttgggaggctgaggcaggagaattgcttgaacctggaggtggaggttgcagtgagacgagattgcgccactccactccagcctgggtgacggagggagattctgtctttaaaacttaaaaaaaaaaaaaaaaacaagtctctgagcctcatttgtaaaatgggaatagcaatacctgctttatagagctaacattagaatgaataatgtatataaagttctcaatatagtatcaggcccataagagtaattattatacggtcattattctacacagaatactctttcttgtagagtatttgtggattaataaatacattaaagattctggctgggtgtgatggctcacgcctgtaatcccagcactttgggaggctgaggcgggcagatcacgaggtgaaaagattgagaccatcctggccaacatggtgaaatcccatctctactaaaaatacaaaaaaaattagctgggcatggtggcatgcacctgtagtcccagctactcaggaggctgaggcaggaggattgcttgaacctgggaggcagaagttgcagtgagccaaggtcacgccactgcactccagcctggcaatagagtgagactccgtctcaaaaagaaagaaagaaagaaagagagggagggaagaaagaaaagagaaaagaaaagaagaaagaaatacactaaatattttaagttcctaaaagctgaaactttatagaaataaaagttattatcaaagtagggcaggggcatgatgttcattatttgtaaatgatgtgggtctattcttagaagagcctaagtaatcagctgaaaaacttagaattaataataagagtttaggccaggcgtggtggctcacgcctgtaatcccagcactttgggaggccgagatgggtggatcacaaggtcaggagatcgagaccatccttgctaacacagtgaaaccccatctctactaaaaatacaaaaaattagctgtgcgtggtggtgggcacttgtagtcccgctactcggggggctgaggcaggaaaatagcatgaacccaggaggcggaggttgcagtgagctgagatcgcgccactgcactcctgcctgggcaatagagtgagactctgtctcaaaaaatatatatatatactaataataataataagagtttattaatatcactggatagaaggataaatatataaaaagtgtaaatatattttaaaaaatcatttatataccaagaaagtaaatgaataccaattttttttgttcccaaacttaacaaaactaagaaactgcctaggaataaccttagttgggtatatggagtaaactgttactgagaaatatttttaaagtctgaggaaatggaaatttctttttctttttttttttttcatgaatcatacgtgagcctttgataaatttcatgttcattatggaaagaatatatatatgtgtatatatatatttctttctctttctctctgtctttatatagttcccatgaaactgccttgtttttggaatttgattaaatgattctgaagtctacctttaaaaaaataagaaaaaaattgaaaaaataataatgaagtactttctcttgaggtgtaagacgagcttctagtatgaagctaatagttaaatttagtataatattgatgcaagaatggatgtatatatggaacaaaatagtcagaataggcctaaatataaatgtaaaagttggtaaattgtcatggaatttttagttaggagattgaaaaagaattagaatctagctggacacggtggcacgtgcctgtaactctcaactacttgggaggctgaggtaggaggatcactcaagcccaggagtcaagttcaacctgcgcaacacagcaagaccttgtcttcaaaagaactactaggtcctttgccaaagaaaattctaggcacattcaaatatatatatttttttaattcaaacttgggcctggcatggtgactctcacctgcaatttccagctctttgggatgccaaggcagaaggatcacttgaggccaggaatttgagaccagcctgggcagcagagagagacccacatctctacaaaaaataaaaattagccaggcatgatggtgggttgcctgtagccttaaggaggctgaagtaggaggatgacttgagcccaagaatttgaggctgcagtgagctgtgataatgccactgcgttccagcctgaatgacagcaagacatctgtctctaaaaataataaaataaataattcaaactgtattaaccatgtttttgtgtctatactgcctctgtattaatagaggattagtacattggggaaaggatttgcagtaaaactgccggggagtaatatccctgctagcaatctgataaaatttatcatgtgcattaaaaatattcataatccttaacctagtagtcgttcatttgttctgcttggtatctttcctacagaaatagacaaagaaaccaaaatttatatataaggttggtgcaaaagtaattgcgtttttggaccattaattttaaatcactgtaactagactcagacacatctttattaatcaaaataggaaccactgcaatcaacacatttttgccactgagaaataagtttgtttattcctgtagcctaaaaatctatgcttcaggattcgacaaactcttggaaaatattttctgcatcctgctggttgtggaagcaccttccctgtaaaaagttgtcagatgcttgaagtggtacctggttggcgagaggtcaggtgaacatggcgggtgagacgaaactctgtagtcaaatttgttcagcagcttcagaagttgaatgaattgtttattagaataattaattcttagttattaacaattgcaaaaactataggttaaaaataatctgaattccaaccccaggaatggtagaatttgtaattttatctgcttgtgcacatacttgtaatggagtatcatatactatttattgaaaatcttatttttgattcattttatcaaattaactccctctacccccaaaaacagcgtagtaccacttttgaattagatttgtgatcttacctagcaccttgaatttgtaagaatattaaaagaatagccaggtgtggtggctcacgcctgtaatcccagcactttgggaggccgaggcaggcggatcacgaggtcaggagatccagaccatcctggctaacacggcgaaaccccgtctctactaaaaatacaacaacaacaacaaaaaaaaaaaccgggcatagtggcaggcgcctgtaatcccagctactcgccactgcactccagcctgggcgacagcgagactccatcaaaaaaaaaaaaaaaaaagaatattaaaagaagaatatacgatgactaaggttccttctaggaatgtaaggatgagttaatatttgaaaatttaataatcgtcatttgttagcaggtcaaatgggggaggagaagtcataacacagtgacttttatcaatttaatgataaaataacatactatgatcttttaatatctagctgaaaaattgccagttgtcatgcatcatgaaaactagttaaacatcaaaataggctatcaaattatcccactattaccattattatttaatatagtctaagtaattgttagccaaagtaattacaccaaccccctcccccccacaaaaaaaatcaacataagagatataagtactggtaaagagggttaatgtgttatcatgtacaaatactattatctacctagagagttaattgaaaaactggtagagattaatagggtaactggataaaaaataagtatgtaaactttttaaatgttaataacatttagataacaaagggagagatacgttttattcatagtagtaaaaaaaaaaaactaaagaactctggagagtaaacttaattagacatgtggtatatatagatgaagagggacataatatgtgaataacaaagattatgccatgttcctgggtaagaatgcttctcaaattactcctgaatttcatctaacaccaatcaaaatcctaacttttttttttttttttaatagtatgagcatggtcattgaatgacttctatagttcattgctagaatagctaaaatattttggagaactagaacagaataactggaatttccctaacaattttaataaaaagtatgctggtgttgattcagtattggacaataagtggaaagaataacattcggaaataaacattcagaagataagcccagtatatgtaagaatctaataagataaatatatttcaaattaatagggaaattatagttattctacatttacagaagattttggaagaaggtgctggctatttgttatggggaaaggatggattaattgctaccccatatttaagtatgttcttttttccttttttgtaatggcagtttgtcagtgtgaaataaaatgttcttttttaattaaaatctaaattaaaaattaaacatggagacaaaaggaaaataggctggcatttttacagtgtcagggtgggttagcaaagacatgatatcagaagcagaaaataaagtgatccgtttgactaaatagaaacaaaacatatagcagagacttgtaaataaaattgaaggcaatcagtaaactgggaaaatacatttgtaattttattgacaaggggtcaacattcttactatttaaagagcccttacagatgaagaaaaagaccccaacacctcagtagaatgcaggctgaagaacatgagccagcagttctcacaggactaaatataaactacacatatatagatattcttttgatttaataatcctacatgtagccatttgttctaatagcaaaaaatgaaaaaaaagttggttaaattttgataatactaatgttgtgcagtcattaaacctgaactgtagatttctattcattgtcataaaatgttgaccatgtatttctgagtgaaaatagttactgagtagtttaggtaaggcaagagtcagtgaagcaatgtctcgataaaaatttaccaggatattagcatgcgtttatttgtggatatgattttcaggttgtgtatgtgctgtataaccttggtaattttttgagtaaaggtgaaaaataataataataaaagatggatagatttgaccacataaaatttggaaactatatatgcaggaaaaagagaaaaagtaggcaaatgacttggctttctttggcctgtaaacttcttaagggcagacatcaggtctcttgttgaatacagtatcataataagtactcagtaaatatatgttgaatgaatgccttgtacattgatttgcacgtggcagatttcacctgtatcttataactcctttctacaactaacttcatcacttaacataattgactttgatagttatagtgttggacctagcagtacagagatctgtaagattccattgtttaagacccttgaaatattaaatatataaaagttattccgaatataagccatgaattacatgtttgtttctgttttatacctaggcactttttaaaaggaggaaagaaaatttagtatctggaacaaaaggaagatgtgaatatacttccaatctaggaatattaaaaatcctgagatatcagaaaggaaaaatatgcatcttcaataattttttgcatttattcttccctcttcatctaaacatctcctaccctagtttagtgcctcataattctttgctaactactgtgttaactccagatggtttcccagttactagtctcatactgaccattgcttccagataatcttcctggcccaaaaattttccttgaaggcctggaataaatgtcactccttccatccaccaagccttggggatatactttaacctattgattaagaatatagatagatggagccaggcgcggtggctcacgcctgtaatcccagcactttgggaggccgaggcgggtggatcacgaggtcaagagatcaagaccatcctggccaacatggtgaaaccccgtctctactaaaaatacaaaaaattagccgggtgtggtagcgagcacctgtagtcccagctactcgggaggctgaggcaggagaatggtgtgaacctgggaggcggaccttgcagtgagccgagatcgtgccgctgcactccagcctaggtgacagagcaagagtccgtctcaaaaaaaaaaaaaaagaaaaaaagaatatagatagatggggccaggcgtggtggctcatggctgtaatcccaacactttgggaggctcaggtgggtggatcacttgaggtcaggaattcaaggccaacatggtgaaaccctgtctctactaaaaatacaaaaattaagaatgtagatatatgggagcaagaatacctgttttgtctctctccacacatcaagtttctcacctttaatatggggatgataataatagtgcttgatttatagagttgttaaaattagatatttcacaataaagcacatggcatagtctgtggtatataatcatcatttagaaaatacagcttttttttttttttaactaacacatagcaatatgatcacctttcttgatcatgctaatactaatgtgttcactttttttgttgtgtcgttttgttttgttttgagacagtctcctccctctgtcacccaggctagagtacagtggtgcagtctcaactcgctgcaacctctgcctcctgggttcaagtgattcttgtgcctccacctcctgagtaactggaactgcaggcatgcaccaccactcctgcttaatcttttttgtgtatttagtagagacagggttttgccatattggccaggctggtctcaaactcctggcttaagtgatctgcctgcctcagcctcccaaagtgctgggattataggcatgagccaccacacctggccctgtttctatttcttacaaattttaagcctcttgaaaatagaatgtatgatgaccatttttcccttcatacctagttcagtaatcagtaggtattaaatatatatacttttaactgtaaatgaataaaactgtatttttattctgagaatcaagtgagaaaggtgctttgacctaaatggtcactaaaatatttagtgtagtgacttgctttttaagtggatctaagaagtacagaaaataggattattctagtcaaaaagaatgtgaacctaattttttaatggttgggagaagtttttgtagaaatcatttcatgctttttaggtagaaaaggggctagacatggatcaaggaatcatataagaatagaaagagcttctgaaaagggacacacatatataagagatggtgaaaggaatttggatttagcatcccagtacctttagttggtgatatagcagtttagtagagggtaactgtaacacagtaacaaagacttttcagaaactcaatgtaaaagaaagaactgtagcagtggctcacgcctgtaatcccaacacttggggcgtctaaggcgggcagatcacctgaagtcaggagttgaagaccagcctggcaaacgtggtgaaatgccatctctactaaaaatacaaaaattagccaggtgtagtggtgcatgcctgtaatcccagctactcgggaggctgaggcaggtgaatcacttgaacccgggagacggaggttgcagtgagctaagtaaatgccattgcactccagccttagcgacagagcaaggctctgtctcataaataaataaatgaataaatgaaagaattttatattttgcactggtagaaattaaattagagatcagtcacatttgatttacctggagtttgggagatagaatgttttcagagttattttaagcatggtaattaaagagtttctttgggattttggttggattggaggagataacttaatgggatgaggcagaaaacagttaagagccattgtagattacagattaatggctttactgtagagccttaaattaatctgtggtttcaaactctcatccaagctttgtgtttcacagacttgttgagcccattaaagaaatggaagtctcgctatctgatggagcagaatgtcaccaagttacttcggcctctgtctccagtcacaccaccccctcccaattcaggctcaaagagtccccagctggccacacctggctcatctcacccaggagaagaggagtgtcgaaatggatacagcctcatgttttcaccagtcacatctcttactactgctagtcgctgcaacactcctctacagtttgaggtgatttgggtttggttgctgggagtgctggatatgaaaatcatcatttgtaccttctcatttcaaatataataccattccaaatgtttctttactatctttcttccccatctcagtaagagaatgggaaacctcagggtcattgtggcctgttacctggtagcctctcatcttggcagcccctatgcttcccaaaataggcatactgctaccacaaatcccattcatgtatcttttgcatgcagtccatcaatctccataagtttaggtagtaagcatgctagatctccatcgttatctttactgtatactttggtcaaaataggcctctagctgcctgtagtatctgttagtaacactagcctgagagcacagatgatattgattgattgtgtcttcgtttctaggcctttaaataagtgaagtgtctttcccaggttgtttggtattttcattgtggccttagcagagatttagaaaacattggggtatggcttatggcgaatgtgggttttttccactccaggttactttccctctttgttataatgtcttaggaatcagaagtagacaagaggctagcaacatgtattcatgagacaaatttattaccttcactgttggattaagttagaaatgtctgcctcagctgtttcaaaaagtaatcttgaatcactttagtgttcaggtttgggtgacagcaggtttcaatagaatccatgtatacttttttaaaacacttcatctattgcatgttactttgatttgtaattaaaatggacactgtctcttttttccttctcagaaaaatttgttctgaccactaaacacactctgctgctctgcccccttgtttgcacttctccagatgtgttttttgagaaaggtgaacattttaaccaatcttacgtttcctattcagcttttccaagtatgaggattcagaatacttagcttttatgagtaactaagaggcagctagcaacattgaaagcagaactgtattctttcttaccctagacctctacttttggagcagacctctttctgggtgagggaaaaaacctcctggttacatatcagttatctagggaaattactctttaccagattatttatgaaattctttcagccagataataaagcagctgattcaggcctttctaacttgactttgtctacttgcaattgactttgcagtttgcacctagagctttatagtaaggtatcatgagaggaattctccctggagggcataagattataggaatagagtgtcatactttatcaatacaggttttattataaatgtggaattatgaaaattagaaggaggccgggcgcagtggctcacacctataatcccatcactttgggaggctgaggcaggcggatcacgaggtcagtagatcaagaccatcctggctaacgtggtgaaaccccgtctctactaaaaatacaaaatattagccgggcgtggtagtgggcgcctgtagtcccagctactcgggaggctgaggcaggagaatggcgtgaacccgggaggcggagcttgcagtgagccgagatcgcgccattgcactccagcctgggcaacagagcaagactccgtctcaaaaaaaaaaaaaaaaaaaaaagaaaatcagaaggtaagtcactttgcaaaacaagcgggttcagtactcagtgtgttccttatcccttgtagcatttgggataactattaaacactgcaaatataaagtggttttggttttgttttgttttgttttttttaattggtgatcattttaataatacagtccatgcataatgttagaataccaggagggaaggaaaatattaaatagtaaaaggtccaaggcatggtttcacttgcaatttaaggaaattttacctttctcatcaataatagaacagatttcaccaccctgacccattctaatcaccattttaatggccatactctttgctgtattctagtacagagaggtggggagccttttttgtagcaaaggctgtgacacattgtgaaatatcaaaaaggtgtcacgtataaagaccagcttaggctgggcatggtggctcacacctgtaatcacagtgctttggaaggctgaggcaggaggattgcttgaggccaggggtttgagaccagcctgggtaacatcgtgagaccacatttctgcaaaaataaaatacaaaacttagccaggtgtagtggcatatacctgtagtcccagctacttgggaggctgaagcaggaagatcacttaagaccaggagtttaagactgcagtgagccattattgtgccactacatgccagcctgggcaacagtgagatcccatctctaaaaataatttaaagaccagcttaggccaggtacagtggcacacacctgtaatcccagctactcgggaggccaaggcaaaggaattgcttgagcctgggaggttgcagggagccaagactgcgccactgcattccacattccagcctgggcaacagagggagactctctctcaaaaaaaaaaaaaaaaaaaaaaaaacaaccttactagattagtttggggaaggatatttttgagaaggaaaaaagcattcaggaaaatggtgagaagtcttaagtgctaaggggaagaaggtaagaagataaacagtggaagagaacaagatcttcaggaggggaaagcatctagaaagaagagtggaagcaacattgggaggacaagcttagttagcctctcctttctaccagaataaccctcccctcctattcttgccctgagagccatactccacccgccatttcacacatacgtgcacctagatgtacaccacccactgtccatgccaagtaaaattcacagccaaaaccctgctttgctgaagcagcctcatttcccctacctcagcatgtgcctgccacctaggccacagttattcagagtctacattaggcaccctctccttacctcagccctagcacccctgagtcattgtcacactaccaccttcactctcttcacgtgttcccatttacatctttccattaagcactcactgctcagtctctgttatgggactgctgcctcacctgaaagtcccaaggtaaagtcctaccctctgtaggatacagggacctaagtatacacatacatgctttttctgctctgttgccaaaagtacaatggattttacaaaataacattaataggggtggctcaggtctaattagattatgccaagaaccaactctagcctgtgagctagggattccatcaatcacatttcctgtaactgtcattcaagaggaactggccatctccctaaccatgtcagcccccagcacactaatgtctccccctggatagcactgggagggcctgaggcatataagagaataaagaaatgtgacaagcagaagaggcattggatgaaggaacaaggtccatgtaaggaggaataaggggtagggtgcccctcaataacaaatactgtaggttgctaaactctcatctaaaatacaaagacgtataacactaaaatttcaccagtctaactctttccttgtatgtgcttgagatgtttacttacagcatgaaacattataaccaatttatccttaaatgctttcagagataccaggaagcattttaacaagtcattctgtccattgagatgagttctgcagttaaatatttcccctatgcattcttattcaacttccccgcccccgaaaaaagttatggctaacatctatgcttgcttttattttttgttttgttttgcttcttgacttcgagtagatgaataataacaagatgcttttccctcctctagaacatatcctcccctgagagttcccctgcgcataggcccgagtccctgtcacccgaggtagttatcacaccatctcaatcacacttggaggctgagagtgagtgttcatgaatgtgttcctgagtgtgtggggagggctggggatctgagtcagtggggtgatgggctggagggcggccactcagtcacagtaagttgaatgagtcttcctgtgtgactgtgactacacaggactgtcaatgtagatggaggaaaatgaaggtaggagcgtgtgtgtttgtgtgtgtgtgtgttgtgtgtgtgtttggtggggttggtttttgccgtttgggggagggggtggctggagttctattaaagaatagaatctagaagtcaagatgctgatatgtggtaggagccttgttaaagaaaggctaataaatcaggaaagttgagtcaaaagttgtaagagctgttttttgagttgggtggtgacttatgccttgttctagggttaatctaacagctctgtaaaccagatgttttgacctttggttgatagattgagcagcttcttcaggaagggaaagtcattctgtctttcagctttcctacattttctctgcagctccttactgggtgcacaaggaaaccaagtgagtccctggctttctgtcacaggccaccattctgcaatggttaggatatggttgctatacaagtgttatctctttaggatatcagtagagtggttttctcacaaaccctactgctgtggatatgtcaaactcagattttagtgctagagtttctattataagctttcagatttagtaacattaactctgaatctattaatacatgggaccttttttctcttgaagagaaagttagagtctctcagaaatagtcaactgaactttaaccctatccccttccaataaaaaattagggcataattcagtgacagtctactaagttctgaatcagtagtagttcacaggttaatatgaaactgaaaaaggttttattccactagtatattagagattttcttggtgttttgactctagcttgttaggaaagtaaagctctctctcctcagttgttaaagattctaagataacgtaatttgaagactgatatggtatggtatctggttttctggtaccattctttgtcggttagctgtagttgacctagtgttggaagtttggaggttatgataaccaaatagtaggtggggtttatttttggtacatttcagcatttcagaatctgcagtgatgagcattagtggtcttgtggtatgttgacgtacattagaggataaagaagaattgagtggccagaaagttgtatgagaaacacagcttctttaacagtgaaagtgagtgaagaactggttggttgatgtctttaatgccatcctcctttactgaaccagtaacttaagtacttgcctttccgtctaccttctccttcctccacctttttcccttccccccaccttccatcaatattaatttagaaattgataaccccggaagccagttatcttaagacaccagtctcatctttgttttgtgcatggggctaaggtaaattcctaattataccacttgtcccttagtgtagtacaaggtgactcagcaacctgatgaaaggctaagcaggcaaaatagtcacatttagccaattacctaattctaactttcccagtatttcccatccagaaagacttgaaagcaattttggaaaggccaggattctttagtactctggcccatgtacactgttgctacgtgggacttttacagaatataatggctttatctgctctacttccgtccctcttatctttccctgttcacctgtgtccctctcccctcctttctgccctttgactttttcctttctcccctaccccatgtctccgttgatttttattctttcagctttgtcaccgaaaagacctggatttggcaaaagtaggataccttgactccaacactaacagctgtgctgatagaccttccctactcaactcaggtcattctgacctggctcctcatccctccctcggacccacttctgagactggtttcccaagcagaagtggagatggacatcagaccctcgtgagaaactcagaccaggcatttcggacagagttcaacttgatgtatgcctactcccctttgaatgctatgcctcgagcagatggactgtatcgaggatctcctctagtgggggataggaagcctttacatttggatgggggatattgttcccctgcagaaggattttccagcagatatgaacatggcttaatgaaagacctctctcgtggatccttgtcacctggtggtgaaagggcctgtgaaggagtcccatctgccccccagaacccaccacagaggaaaaaagtaagtgtttcatgttatatcggcgaacttttcaagaatgttaaccaagtagtttagtagatattcataagtttctgctatgtgttccgcactactctcagacaagtgagacatagtctctgccaaatccagtgaaagacaggctgttttagtacaacttggtgaatgttgtaaatattcagcaaatgtaaatgcctgtatgtgccatatacttgctaggcaattgagaggttagaacagtgaaaaagaaattttacctattatttagtgtgtcccaagttcgaggcactgtattaagctctttaaatgtgttttatcctcacagtaagcctataagataggcaattttctattttgcacatgaggaaactaaggcaagttgagtaactttcccgtggtcacacagctagtaaatggaaggaccaggatactacccagtttgagagagaaggctggagtgagaggcagcaggttactgatttaactgaatctcaaacaataagtaggagtcagccaaccaacaattgagggtgaggtatgttacagtagagggagtagaacaggtaattaggtggcactccattggccaggcagcaggcatgcagtatggtgcaaacagttggatgttgttgtatcaggtggaaggccgggggagccaggaggaaagtgcagagagtgctgggctgggccaggccatagagagcttgctaatgggttgggactccacttccaagtaatgcctgatcaagaagtcacaaagccaaaaatatgcttttgtataagtggttctcaactaggggtgtttgagaatgagtaggagtgttttgaattgtcccagtgacttgcatttattgagcagggccagggatgctgaatgtcctgtataggggacagtcccatgtaatggccaaacatctgtagtatcctcattgaaatgaaacctagtggtttttttatattttcattataatgatattaccagaatttattaacttctttccaaaattatttctagaaaatgcatatgcaaaactgtctatatttttgttccatttggacagaaaaatgagaaccctaaggggatagaaggaggaggaaacattggcagataatttggattaagataataattgatttcgaagattgttgcgtgaacagcattgactaccagaaacaaacatgaaaacaatctttggatttctggttttataatatttactatgtgcaaaagtcatagaaattatgatattttatttcagaaacacttctgaaatttattgggcacatttaagcataaatttaagcatatgccaaattctgtgctggatgttaaagataaaaagccagataaacttggcctttgccttcctagaacttatagtttagtcagggagcaatcaaggcatggtaataggttctacggcctgtgtaagcaatgtgccagaacaacaaagagaaggtgtactaggcagggcacggattatggtgggcagggtgggatgggaggtctgctgtcaggaaagaatgagcaagcattagggagatgaaggggaagttagggagaagttaccaagttgttttctagagctagcttgctaaaattataaactggaaataataatttcctctctttttacattaattacatctatgtgtaagacagaaacagtaataaattcctatttatatcttgaaaatttgaacatatttaagtatcctggagcattgggtttttcttctgttttgttttgtttttccttctctctctccctctctctctccacctacctctccccacctccctctcctccatctccttctcctctccctgcttctttctctcaaacagctaactctaggggttcccaaggagtacagaacagccatcagtcacctgggaggctttttaaactatacaagcttccaattctcccttctctaggtacttccattgttgcaaataactgtgatagcatgcttctgttactgtgtaatggtaacctcacaagtttttctgaaggcagaaaaaaagatggtggtctaattggcaaacattctttagagacttgcctcctagtttattatcttcctcttaccaatttccagctgccttaaatatgtagctgtgctcagatctctttcatactccccaaaaaaagttatcagggttggtgtctgctttgtttgcgtggcttggctagtggtttactaaggtaccatctttccttctttccctgttgctggtgatccactaatgatatccagatagagtaccgttttttgtttgtttgttttttcctttctaggtatccctgctggagtaccgaaaacggaaacaagaagctaaggaaaattctgctggtgggggaggtgactctgcacagagcaaaagcaagtctgcaggagctgggcaaggcagcagtaactccgtttccgacactggtgcccatggtgtgcagggatcctcagcccgaactccatcttcccctcacaaaaaattctccccatctcattcctctatgtcccatttggaggcggtaagcccatcagattccagaggcacttcttcatctcactgcagacctcaagagaatatcagcagtaggtggtaagtttatatttgatgttttatagttaaattgggggtgggggggagtatatatctaagatcattcccagttttacctaaaatctatgggaacacttgatgggaacatctgagacagccagccaacagtaccatctgtcctgttcagctgatttaataatgtcagctgcaaccccccagctttgcagaattaagaattaccaacatgcctgtggagcagtgctttggatgacatgtagttatggatgcagatgagctctttcatttggtgggcactaacactgcctttcctatttctcatttcacatgaaaggtgagtcaagaatccagccaagttccacatgaattaacaacagatgtctctcttccacacagctagcatatacagagcaaaaagacattctgaaaggatttgtctggtttaggggagaccacaaatttaaaaatgaataatactggtggcaaatactgaggatcaaatgtgtgaaatagagaatgaagcacaggagttcagggatcttgaactgaaaaaaataagtctgggaaagaacagtcctggctcaaatgtttcatgttcattaatctatgaaacctttattaaaccagtactgtgtatcaggcacatgatttcctaaaggagaaattttaacattttaaatgggggttaagggaagttaacatctttaacccactttttccttgatttctttttctttaaaagtggttgttgttgatgtttctcttttgtgcctgacatagttggaggcagaggaaatacgttgttttaaattggttctgaagaaagtaatgtttaagaggatgttttaagaaaatacactgtgcactggttagggcttcatttgttttggttaagtcctgtggcttgaacttgcaccctgttgcctttacaggatggttcccacatcagtagaacgactccgagaaggagggagcatccccaaggtcctccgaagcagcgtgagggtggcccaaaagggagagccctctcccacatgggagagtaacatcacagagaaagactcaggtgagcccatggccttctgctgccaccacattcagggacacatgagccgagtcctgtacagttcatgcctagtgctgagttgaggtgagtcagtttctgatgcagttgggctccaccgcatgctaggttccagcccacttatgctcatttgggctaccacatttgtaagatctagcattgcttgctctctgtctgctcttttttccccaaggaatacctttctgtaactctcatctctccaaagtcctggaaatctacctcgatgaaggatgaagagaaagaagacgggaatcacatcaggcatttagaacatagcccataattaaccactcattttgcccttctggca

SEQ ID NO: 342 - DNA, 32765 bp, Homo sapiens; identical to SEQ ID NO: 332
  source 1..32765: mol_type = genomic DNA

SEQ ID NO: 343 - DNA, 32765 bp, Homo sapiens
  source 1..32765: mol_type = genomic DNA
ctcgagtcctgccgcctcccgggagtgccgtgcgccgcagcccgggcccaggccccggcagcgcctgggacaaggtaagggtccgacagaaaagagaccgaacctcacgatcgggccccaggggagggaagggtcacctcctccgtctccccgcgctcgctctccttgggtcgtgggcctggccctccccaagctcttaggaggatgctgccacttctcacccccctcgccgccttgcacacaccgttgcaacaccccattttcccagggagagagatccccctctaatctaggcgacccaactccccctttcatgtttttcctgggtcaggacgcttcccctcccccaacgcctcttcaccccctttcctgggaactgcctactccacgtttacctttcccttgaggagaggcctcttgctgccctccgctcgaaatacacaggcatactttttttctctccccgatcccccactccctacccccgttctcgcggccttgtgacagacaactctgatcgctctgggggccgcgatctcccctccgtaatcttcctggacgccttccctctcgttttctggcttcccacctcagatggctgcttcccaaaggcattaccttcgccacccccaccacacgttctctggctccccgtggcgtgtgccacagcgtgtctgagatagcctcgttgaatgtgtagggttcgagcctggagttgagccagattgtgtcgttttacttgccttgggcgtggagaacgatcttgtgagaatatcttcaaaggcagaaaaatattccctttatgaattctctttccctctgcgtgtaagtcgggaatgtgaagaggagtgtaggaaagagccctggttcaagtaggtaaatcgcatgagagggaaagttaaactgttgggaaagccccttctatgctaattgattctatagagtccttgcttgtctcacttcttgggcgtcagtggtctttctcttggatatggatgctgcagtcagctctgctggtctgggtcaggggtgcgtgtatgacctgcattttctgctttctcatgttacttgtgcaatgtattcaccggtaactcatttctttcccagacctctgggttccactgggctttgtctatatttaagttcatttctccagtttccttcctgcacataggtactgaacgaatccccaagttctgtgctaattaccttcatcagttgactaaacaagtttttagatgacatatttgtgaccaaggtcatatttacatttctttgttggacagatgttacatagctatacttgtgattggggaggatccagctgagtggagtgtgctgagctttttaggagagtgtgtactccctatttgaaattattttttggttgttaattttatattattaatgtttttaggtcacagaaagttctaagtggtaattttagatgtgtgggatctgagctaggactaaagcagagaatacccacgtaatcagaggtttctgggctccatagaggacgtagggcttttttttttctattggatttcttccagttttctcaggatcattagttctcttctgtagccaaaaattctggcctgttatgggattagagtctttaaggtttactcagactgtcattatgtgtagaaaaatgaattatgccctttggtaggacatgacacaaggctctgtttctagctgcaaatttaaattagattgtagagtgcttgggaaattggctttcaaaagaccaaagcttaatcttcactcctaaactgctggcttaattaaaatggatatttagaatttggtaaatgttgatttttctaataaaaggccttggtttaaaagggtgaccttaggattgtttctttcttaaaagcataattccagcccttctggcatggagcactggtccaaaaaaaaaaaaaaaaagtgtgtgtaaggagtgggggtggggtaaagagaaggttgttcctttgggttggatcacaggggtgagtatacaaggcagcagcagctgctggctctggagctctggttgctacgtgagaagcttgagtagtgctggctgctgtctccagggaaggacagcagtgcagcgtccattaatgctgctggctgcagggagcagcacttaggcgatggctgcttcaggactaagaagaaaccttgcttttctgggaattttcactgctgagctggtttgctttttattggtggggagatgggaattagtaattcataatctcctacccatttatggatattggcatctggaaactggatcatggttaaagcctttctttttttgtttgtttgatttgatttttgttttttggcagatttttgttttttatctagacatttgtgcttggataggactaaaagttccattagagttttaatttttcaatcagtttaaaaacccaagtaataattttaagaatctttctgataaccacaataggaagaaaataacaggaattttttcctgcagctcacatatcatgccttcctccatctctttaatcatagaatcaattcttattattttgttatgtgtctccatcctttcgattagaccacatttaccttatagacgatttgctaaacattttactaagcttgaactcttaaactctaaaaaggtgccattttggagtggtttctaaataaatatttttaatttgtatattagtaataaacttctccagattagatattttctttggagtttgacttataagattgattcattatatacatgttggatatagccttctgacatcacaaatatatgtctttggccataatccatctgaaatgtaggacagaccagaagaaatatgcagaaatcgaataagtctagttcaggatactgagaagatggcctctgagccccttaggtgatctcccctcccccacaactcctgaacattaggatgatctctgattaagcaaaacagtctgagcgtggaaaaacttgaaggagaaccaccaccaccaattatatgcaatactggacatattcctgtgtgctgtttttcttccccaagactcgtgtatcctatacttttttctctcagaattttgatttgttcattttcgtgtaaatgtacttaaatctcacaaacatctataatttgtagtatcactctggcatttgtggcagagaaccaaaaagaatggaaatgagttttgtcattcacaaatgtggctcacattgttttcccagtaataaaagcagaccaatgaaacagaacctttaatggatactattttaggaggttccaattcttattactatcacatagataagatgcaatagcagataaatatgatttcatgtatactggctgtttgacatacttagggtttaagataaaaatgtttgtagttttttactctgtggcttaagttgctatataaaataattgcttttacactcgaatttcctgttgtttggaaccttttgtgctcttgatattatcattttttagaggatcatacaggcccttttcatagaaggatttacttaagttatacccttgaaaacttttttatatcttttgatactgttttgtgtccaggaactgactttctgaaattattctggcttttctggggagaatgactatttcatttttacctttgaatggggaaataataaagtgcaaagtacagatttgcagataattacttttgctttatcctctccatgttgaaataacttatgaaaaattaggccatagttaacagcagtcaatgactattggatacattttatcagaggggaactggatcatgaataaaataaaattttaaaaataatttttggctgaactctggtgattcatcagtttaatttgaagtcagaaggtctagcagtgaattttatttataaaaattgtatttcaagtgttgaaaactgaaacttcttgaccagtatattttgtttgaggcatcaaactttgcaaaatgtgcatcgtatatttagtgatataactggtagtcatttgtaatttaaagtattctttcaaaggcactctttagaaagtaatgtagtgtacccgtgatgggcagggattggtaccattccttactgccaaaaattccaaaatatgtggcaaaatgattgatttatcttgtgggtgggattctgggaagttcatgaaaggtggagagaatatagtttccttcacttgtctatatacattttgttaaataagtcttaggaaaactgttttattgtatctttaattatgaattgcgtaaaagatacccagtaactttggggggaggtgctgttagaaagcattacattggagagaattcccctaccctgggacaaaatgcattctgtctttaatacttagcgaagggaactatgggataaaataaacaatgaaggtaagctcagtctgctttatatgtgccctcactgagcaaggaatttgtaatcgcatcgtgcctcattcgtttataccatcatattgattttgtttgctgagtacctgagggaataccttacttaatgtaaggtcacattaagtatgtttgatatgaagacagggaaaggaattttctgcttcttggagtaatgtcttagtatttttaaaacacttaagtttttacatcaggccagttttgcctgatgctcatgtctgttgctttggttgggctgctgctttctcttctgtgttcttatgggttcgttgtggtataaggattcccacagctttcatggcagtatgaagtaatgagaagcattgccttagccatgttagttacatgtatacttttggcctatgttatgaatcacaaaaagcggtagctataggaatgtatacaaaatagatttctgtctggggaatcaagtttttgatttgtgctacctaatggaggggaaaatgctgaatttcttgctgctctgtttgagaaatagatggaagcatgggaggagccagagacctctgcagcaggatttggtctaagtagaaaaggaagatttttgtttcaaattgccagctgcttatgtcagactgactcccttattatgcctccagtaggcctgtcaatatggccaaacagctagataagtgcggggcaggacaaagggctctttgcacagcagggaggcaatgttggtgggggaggggcaggaggtaggaaaggcaagaggaggaggttcttttccctgggagattattcagtttggcatacaattaaagaaatcatttttagttcccactcaagcattgaatttttgccaaccacatactattaaccccaaatttgatacatttcagaatatcttgtagggatccattctcgccaaggaaaaataaaaaaataaataaagctctgtataggttaaaataaaataaatcccacactctgcaccctcctaggtgcaagtcacctcccgaggagacccgttctagagctgaattctcattaagaaatggaaaagaatactctatctgaataaaaacacattgtaatacaatgtgtttatttgggttgggattggacctgaacatgtagaataatttgtttccctttatgaaatagttgctcgtagttgtctacaattttatttcattaagataggtagcacattacagctttcatgtgttgggttgccatatgtaaaatgctaactgaagaaaggctactttttaatttcagcctcatccttagttcctggagaacctgatatttcctggagattactccctcccccaccttttagtttaggcaacctcttttgatacatttgtgttcagctcgcatacaagtgggatagttgcatccagtttattaagacttagtatgaatcatagagttggaaaagatctgttggttatctggtcctttaaaccaaaatcataatgaaatattttgaaatttgggtccctattgaagttttcattaaaatgttaaaggatcggtgttctgaacaacatttttagttacttttaaaataaatgttttgcgtcagttctttttttaaaaataaagaatttcatttataggcaaattagctggcaattatttgaattgtgataggatttctcttttatgaaggaatatatgacaaggtttttcaaaatgcttaatatattttaaaagactttaatttttagaaataattggtttgaacagttttccaagagcacatttgttgcttgggttgaggtaccacctatattgcaatgttactaaactagccttaaagttttcccttctgtctatactgcatgcaacaataaagggaactggaatgttaatttccatttatggattagcagaggagatgttttaaccgattaataaccaaaaaactgcctttcgtacacgtaatattaagcaagcctgaccaagttttgtgttatttctctctgttaaagaaaactggatgtgttactacttaacattatattgttatttaatggtcttggcagtaatgatataatatttcgaccaaaagaaattttgagtaattaattattattgtaattagttggaagtttctcatcagtaaaatagcaacagcattaacacaaaatctagtgagctatattttatattactacagaaatttagggtagtcatttctttctttataatttattcacatggattatttccataaatttgtgggactaaaatagaagccatctagtcaagcaccagtctccataccagacagttttctctgcatgtgctatgacccacattgccagtattaaacatcctttacaccctcccccttcccagataattagaaatctcttcagggtagcttccattgctcctattacctggatcttgctagaggctctaagaagttcctggtaaaagtgagacagtaagggaccacattttgattccaaaggttttgataactgttagggctccccaaacagctaatctcattttcaccaagacttagccagcagagggctggaatggaggtgaaacacaagcactgtacctcatcttgcctgtgcagctgctccaccttatttcctgctattattatctcacaacgcctcctcccatcaaaaagaaactaggacaaagggggaaaattggatgggctaatgtgatttttattatgctaggttgtgggcttgtttatatgtacttaaatacaaagctaatttgccccattcttaaaagtctttagtgatagagattttgtaacttctgtatcttctactttctttcttgataaaccatttcagattctcagccttacagaaagaaaggttttaagcatacttaattttcgttggccgttcacagtcattattaccaccagatgccactgtattattagcttgaagaaaggtgggctctcttctgtacataatatctgcaatttgttttggaaaatactaatttgtataaatctgatttatgactaaaataaggttaaaaattagacctctatgtatgtttaccctattaccttagtgggggtgaaattaattagctctttgaacataaatttttcatgtcttagagttcttttttcaagctgcataatttatgttcttcaagccatttttatcccataccacccccacaaagggggaaattttattttttatcatttttattgtctttcaatggtgagattttcgccaccccactcctgaaatgtgaagactcaaataaaactgagtaatctaataaggtatatgcgttgctgaatgtagtaagatgattgtttcatcattcttagatattatgatctagtttgaatctggtttccagtatcatgttagcatatttaatactgttgatatgttaattttaatacatgcccaggtggatctccttgctttctatttgtgccccttgtttgtcgttttgtatgaagggggtttttgttgttggattttcttccccatctctgtgtcctgttatgttctttggcttatgtttcaaaaattctgtttcctaccaccaacctctgtacatgccacaacacatacaatttgtactttcacagtttctgtgaagtaggatgatctgcagttaataatcaactgtttgggcattcttggtatccaaggaaggttttacttagaaggaagaacctggaaggacctgttggcaattagactacttctgcgtttattttacattttcccttattaacgtaggctgttgagagttgacttgttttataagagaaaccagattgacagagaagacccccaatcagatagagttattttaaaaataaatgtgtttattatggtaacatttggggtagaatctaaagggcatatttttaaaaaaacttttagttctaaagacaaaagagtttaacctaaaacagaacaaagagaagggcctttgaagcagtatgattgattatatgctgaatgtagcattagaatgttgtatgaaagcataaatttttattttctcaatttctatggtacaaactactatgcccatggaagtatgtgtttatgcccacagcctgaaatatattcggtggaatgccttaaaaaagaataaatctggccgggcgcggtggctcacgcctgtaatcccagctacttgggaggctgaggcaggagaatggcgtgaacccgggaggcggagcctgcagtgagccgagatcccgccactgcactccagcctgggcgacagagcgagactctgtctcaaaaaaaaaaaaaagaatagatctgaggaaaatgtaagagcaagtctaaaattttgaagtcctttttgaaatgctattttttcctagacaaatttagtgttatttgtggcaaatagaactttaatgtcgtaatttagtaatagaacaaaataagggtgggtttacatgtccctgcacattttaggatggagctaaaaattataatgtctgcataccaaattgttacacattttaatattggggcttttattgaaaaagtttacccaatatttagaaacctttaaaaacaaagtgacataaaatattcacagataaatcaggtagtcaccttattggtggcatattatgtaagtgtactaaagccagatatttagtgttaatccaaaaatatgaaaattatgctaacatcatatacagatctcagaagttgctgtagccagccaggcgtggcggctcacacttgtaatcccagcactttgtgaggccaaggcgggtggatcaccttaggtcaggtgtttgagaccagcctgaccaacatggtgaaatgccatttctactaaaaatacaaaaattacccgggcatggtggtgcgagcttgtaatcccagctacttgggaggctgaggcataagaattgcttgaccctgggaggcagaggttgcagtgagccaagatcgtgccactgcattccagcctgggagacagagcaagactgtgtctcaaataaataaaaaataaagaagttactgtagatgccactcttacttaaaccctaggccatgtgtggagtcccaggggaagacatgtatttttagagaaggaaggctctaggtaggtgtaaccttcctcttacagtttatcatgaacagttagtatgaaaaggaatggctggaagtttgcagtagtacaccgagcaacaagagaaataaacatatcccacttcatgaaatgactatgccagccaagggagatgaaaaacaattttttttatagtacacctcatttttttaaaaacactttaatactaggaatatgtttctgtggcaaatagttacccccaaaggattatgtcaaatatctcttgtgaaaattaattttaaaattaatcttttggctgggtgcggtggctcatgcctgtaaacccaacactttgggatgccaaggtgggcagatcacctgaggtctggagttcgagagcagcctgaccaacatggagaaaccccatctctactgaaaatagaaaattagctgggcgtggtggcgcatgcctataatcccagctactcgggaggctgaggcaggagaatcgctcgaacccaggtggcagaaattgcagtgagctgagattgcgccattgtattccagcctgggcaacaagagcaaaactatgtctcaaaaaaaaaaaattaatcttgtgtagatagtgaccacgttttactttccttgggacagtcctggtttatacctgctatcctagcgtaattagtaatagcacccgtttcactctcaaaaatgtctcaatttggatcataaattatacgcttaccataattgtagaggattgtgagacttttagtcgctacctagcaacctagtttttcttgatagagctcttcttattctggagtctcctgtgctgcgatttatctgttgacctctctgaacccccatttccaaatgagcagtttttcgaatgtcttttttcttttcccattaggtggtagtaagggaaggagtaggtatagatttgattaattttttaattttttattattaaaaactccaattactacaaaatagaaaaatactttggagtttattaaactgttagtttaaaaggttccatttgatcaggataaggtccataccttgattggtaagtttgagtctttatagattctgttttttccatgtaggattcttgttaaagaaattcattattttgtggagttcgtactctggattttgaaggttggataatcatttaacacattcctctattaaacaacctccccccacctgtatttcatgtaaattactgcttagatagattgtaagcatattttataatagtactgtgtatttccattaagagttacataatttctgcttgtctgtgtaatgttaagcagctgttgttattcattgcctagatcaaactttgtggtcttaaaaattgaagacctggaagagcttttgtttgtgtgaattatgtcaagatttaccatattagaaactaaaactgagaaaaattttaagttatttattaatattaaaataacagtaataaagcctgctaatacaagtaatgtgattttttaataaaaataacatttttaattttataagtgtcgtttgacatttttgcaaatctctttaatgtctgacttaatagaagacagctgctttctcataactccttctgcatttaatttcttgtgataagttgttttggttgaagactgaagaaaatctggccttgtacagataattggttggaaaatggaagacctcatataaccctctgacagaatctagaggacttcaggcattctcacaccaccctttttgagaatcactggcctatattcatgatttacttcatattagatgatattttcttacttcttcatttattgtccggaatactcacccttatttttatttggctatactaagatagtttatatacagaaggtaagataagcacttgggttttttacccccttatttactagttttcaaaataatgggttggtaacttagcaacatctaaagacgtgaatgaagtattattattgtgtactcatggttttaaacatgtttgatatgttacagtctctggcagttactatttttgacattcaggttgtcctacctttgtctgttggctactaaattcttttgattcattcttaatactttcctcacttgtttccttgcttcctactattactagatgttctaggataattttgtacattttttgccccaaacctggaatcagccatttctgcagaaacctcttcattcttttaatgaaaaatggtacttagaaaccacagtatggatggtaggagtgttcattgctcttggtttgggccttgtttctagatttttcaatgaacaaagtttaaaagtattttatttctttttaaaaatatcacttggtattttaaaagctgcatttcaaactcagtgctacatgatgtttacgtaaacctaatctttctccctttccccatgcccaaaatctcagttttcactaacaccaatgtaatttctctttgttttgtgccacaatacacacactacagttttagtgtgacagaacaatatgattactggaaagtggctttttgttttgttttctcatgtctttttgcccttagggtatatccctttagagatagagatagtcatgcctcacttgatgaggatattttctgagaaatgtgttgtcaggtgatttcgtcattgtgtgaacatctagaatgtactaacataaacctagatggtacacctaagctatatggtatagcccattgctcttaggctacaaatctgtgcagcatgtgaccactggatactatacgcagttgtaacacagtggtaagcatttgtgtatctgaaaatggaaaagataaagtaaacatacggtataaaagataaaaaatggtacacctttgtagggcagctccattacagtcttatgggatcattatcatatgtggtccatccttgactgaaatgtcgttatgtggcacatgaccatatatagtcagattacagtattttgaaatcccccttagaatagttctctatggttgtgccaccagtttgatacacagtgaggttaatttgttacattttactttcagatttttcagggattaggttttgttttatgattatgtaaaatacttaaatggttaataagtgaaatttacgaagctgggtataatcagaaaaattgagcttctatcctagtgtcttccagctggttctctccctgtccctgtatgttagactcaacagagtcatcatgaattttcagagtgatgttttgtcgatacttccccttttagcagaagaagcatttaggttagttcatttactaaaactatttccttctagatttttcactaactaatatttttacactgtagaagaggaatgtggaaatttctgttctttcttttttggaaccagaatttcttggcttaatacaagcagtttgagataagaaactttctccagtaaaaattctctttttttttttcttttttttcttttttttgagatggagtctcgctctgtttcgcaggctggagtgcagtggcatgatctcagctcactgcaacctaggcgtcccaggttgaagcaattctcctgtctcagcctcccaagtagctgggactacaggtgcctgccaccacgcccagctaatttttatatttttagtagagacagggtttcaccttgttgttcaggctggtcttgaactcctaacttcaggtgagccaccgcacctggccaaaattctctctcttgaaatgccagaccatgtttgtctctgggaatttcaggtacacttgggacactggtgctacttgaagtgtagagagctcatcagttaacatttcttgaatggtttgcccttagacctgaaatgtatgttatttagaaaggatgtcatatattttttaactttgtcatttaaaatccaagttatttgattttatgtgttttaaataaaatattaaaactttaaaagtcttgtacctgttaaatgttttatccttcctaattacagtatcttaaagttatcacatttcagcaatacgtcactttctaatgactaatatagtctttaaaaatactaaatcaagatataccaaaggtgaagaaatagtgattaagaatgtgaggattctagctgtggttttcttgctttggctttggccaagatgagtttaattctttggtctaataggaataatacttttctcctaaacattatgagcattatttgagttaatgcatgaaaagtggttaaaggaacagtggctggtgcaacataagcatccagtaaatgctgcctttattttggaagtggttattgttacgagtatttgatcagttctctaaactctgtctgaactttacttagaattagtaatgttcatatgctgtaaataacacctgattttcaatacttcattggttatatgaaaagaaccaactgttaacaaaggaataattggtatctagttaaaatttgaggcctctgacttcacaagtataccagtgcttactatataaatataatcacatttaaaaatttaataaagaaagttttaaggaagtaagtctccttttcaggatccagggtcctttacaaacactggatcctgaaattgtattatttgttgtggctttagggtattgtgtatgctgaccagagtcacaggtggtttttttgtttgtttaacactagaattttgagatacatttgtctttacatgccctcaaagtaagttatataacaccagattgttcattagttcaggtttgatttttttgttgttgttttttgtttttctttttaatactctggggttggagtgaggttgtagagtgctataaggaattcctattagaagatagtattttagatatgggcattctaggaaaggacaaaatggtacactaaagttatcttcccttttcccccaccaccaaaaaaataaggagcaaactacagtgcacagttttgggttttttttttttttttttttttttttttttaaagagacaaggtcctactctgtcgcccaggctagagtgcagtagcacaatcattgttcattgtaaccttgaaccactgggctcaagcagtcctcccacctcaacctccagtgtagctaggactacaggtatgtgctaccacacccagctaattttttaaaaaatatcttgtacaggtgggggtctcactgtgttgcccaggctggtcttgattgaactcctggcctcaagtggtctcatacctcagcctcccaaagctctgggtttacaggcataagccatcaggcccagcccacattttgttttttaaacaagtctttatcttttggagatacatgctgaaatatttatggatgaaatgaaatgttatctggggtttgctttagatagagaggagataatagatgaaacaatcaacttattagttggtcattgtcgatactagataatgaataaatggacttctttataccattttactttcatactttatttgaaacaaggtcttgctatgttgcccagctggccttgaactcctggcctcaagagattctcatgcctcagcctcccagagctttgggattacaggcatgaaccaccatgcccagcccataatagaaagttttaaattttaaaataaaagtattcatagacttggctatcatggatcctggtaaagtagactagtgaacataatcagatgtttcagtctttccctgttgatactgcttgccctctgagcccatttcctctcctgatcatcgcctgctatttccaatcaacagaaaaaatagagtagcctacatatataatgagtttatactaagagggaaattttaatattataaagaagtctatacagattctggagagcattcctgaagagaagattgaggaagcaaatggattaattaatgtaatagtgtgttcagtgtgcaataggtaacattttatgatatggttgaatttctgaaaaggtatcttataaatatcagaccatatttaaggagacttccacctctactgataaaatctgcccttctctctccccctgactttattgctgcccatctgtagttttgatcttttttctctaggattctttgcctagaattgccatgggccttctggatctggaacacggatgaaggaagaggatgaatgtttttcagatgttatcccttatgggagtaatttgtaaattctagcttcttcgggtggggggaggcggggtgtgtgtgtgtgtgtgtgtgtgtgtgtgtgtgtgtattatttatttatttttttaagttaattggcctcttccagcaaagagtatacagcagagacctagaagtttcattttttgtttgtttttgttttgttttgttttgtttttgagacggagtctggctctgtcacccaggctggagtgcaatggtgtgatctcttctcactgcaacctctgcctcccgggttcaagcaattttcctacctcagcctcccaagtagctgggactgcaggcgcgcgccaccacgcccagctaatttttgtatttttagtagagatggggtttcaccattttggccaggatggtttccaactcttgacctcgtgatctgccaccttggcctcccaaagtgctggaattacaggtgtgagccacggctcctggccaagacctagaagttttacgtcaaattttgtctctgcagttttctgaggaatgagtatatgtgctcaaataatagctaagtattaagtctgaaatattctagaaaaacagtcacaaagtagttatgcctaggatgtttttgaatattggtactagaacaaatggattcctactagatttcctttttactttcatattcagatgtaggaagagttggaattcaaaatgtgaaaagcagtcttgaatctcagtaaattcttaagaaattcttaattcattgaagagccattggtcgtgtgtgttttttggggagtgtgtgtgtgtgttgttgttgttaagaattcggggatgagtatgaggctatcattgcttctacaaggcaacttaatgatagtttgctgcttggcacaacaggtgaaagggcctttctagagcagggatcttggtttccctttttcccacctagtagtatcattccatgtatttaccaggatatacattgtttagtcctgtcttggctaaataggtaatggtccttaaggacataaaatggaaggatattgtgcagaagaattactagttctccgtagtgtatttttttactgtattctcctcatcaacagatggaaaatttttaaacttagaagaaaaaacaagtgtttttctccaaaagattgagaaccactgcttttaagttattaatggaggtcttcaatggatttgttaaaaatctggagcatggattttttttttttaatttttttgttattggttactgagtattggaaaaggaaatacagtattcaaaaacagtaatgttcaggatttggaactattttactcaggaaaaaataagtttataaatagacattttaatgaaaaggaaaatagcaaatttatggaaatctgagatagtctgtgttttgcttcactctgtttagtgctagaattctggactttgtttggggtcaaactctgatatgacaggaaaactaacagatgattaaaagagacagtaacataaatgggaaagtttaaatatggtatatggttttaattatattttgtataagaaagcagtttataccagttgtattcctaactaaaaagtactattttatcagtttcctgggactaatttattataagttaattaatgacatgagcattttggcccaaatacagttgaaatgttcattgaaactggatcaaagatgagcatatgtgtcaaggctttaaaatcatttttcatattaagatttccagagaaagtttttgtaatatataagttaaatatttttaatgctttagatgacaggaactgttgaaggtcctggatctcataacaagccactagctagctgatccaaagacatttggccccatgggcttctaggaagacaaatgtgcttaccatttcaaagattttattttgctcagtaacctactagacatatattagtgtttgtttgagttggtcgttgtcttccattgctgttattttattattattatttttttaattttagagacaggatctccttgtcacccaggctggagtgcagtggcacagtcatagctcactgcagtctcaactcttaattaggctcaagggatcgggatcctcccacctcagcctcttaaatagcttggactacaggtatgcaccaccactcctggctgtcttattgtgttgcccagggtggcctcaaaactcctggcctcaagtgattctcctaagtcagcctcccaaagcgctaggatacaggtgtgagccaccctgcccagccccattgctgttgaacttttttttttttttaaagacaggctctggttctgttgcccaggctggagtgcagcagcgcaatctcagttcactgcaagccacccaccgagctcaagccatcctcccacctcagcctcctgagtagctgggactataggtgtgcaccaccatgcctggctactttctttgtaatttttttgtggttcaaataggaatcttccacgtgcatccaaaatatttttggtttgtgacactcagtgttattattgactcatttttccattggaaggtgtgcctcagagtgggtgagcctttttgccctcagtcttctgtcagcactctaagactccaagtactctaagagattgctcactaaaaataagaacagctggccatctacctcaaatgtgagccgtcacttttgtgatataatcagtccttatctttagtacacagatttatggaatatcacactcactgtctgcctgctttggggtgtttctcctgtgtcattcatttttgtatattggcatatagcaaatataggaatgctgtgtcgcagctgtgggtcatgtatgtacttgcagttagctcttgctcccaagaatgcaagaaatttatcaacaaactcgtgtcataaaaatagtttacagtgatttttttcttaaaatatttcaatgattaagactttttttaataaccacaagtgtataattgtaaaacctaagcattactcagcaaatctagcaattgttgaattgcataagcttcttgttcattggaacttttgctaaagaattatgacctttgatttcttatcaccatgacctatcattatgataaacatgcccctcttatgtatccttatacccattataaggataaacaagggatagctccacccaccagatgtcatagacacaactggtattttggggattttgctgtagactaatcctggaaggaagagaggttatagataaaataagattggccatgaattgattgttgattaaagctgggtagggaacattgggttttctctggttttatatttatttgaagtttttcaccataaagttttttttttttaagataaaaaataaaagcatgaatagtgtaaacaaagttttgaaggagaaggaaacaggttagtagctaattaacaaaaatgttcttgttccattcaggcacaggagtttggactagcccaataagcattaaggaaaccattatttgtagatttcagataatgcaatgatagtaaccaaagttatgctctagaagggataacatcatggaagaatatagagtagattggagggttcacaccccagaggtagtgagaccagttcactgctattatataatgctaccttgaaatcatagggaggcgactgatgtggtttgctaaaagtctccaaaaatttcaaaggagaatagctcttcagtcaggtgctagtgccagcacaacaaaaaagagggttttttccctcatttggccagggcatggatttggaccatgtgggtgtcataatggagtataccaagtgattttgttcctatgatgaaagtgaagtccatattttgtctcctgtcttttagtaaatcagtatagataagtcttttttttttttttccccccgagacggagtctcgctctatcgcccaggctggagtgcagtggcgtgatctccactcactgcgagctccgcctcccgggttcacgccattctcctgcctcagcctcccaagtagctgagactacaggcgcccaccaccatgcccagctaatttttcgtatttttagtagagacggggtttcaccatgttagccaggatggtctcgatctcctgacctcgtgatccgcccgcctcggcctcccaaagtgctgggattataggcgggatccactgcgcctggccaagtctttttttttttttaattattttattctttatttttttccccacatattctaaaataagtctcttacagtgtctaggtttctttccaaaggtgattaaaaatgaagcatcatattttaaacttctgaggcagaactgctagaacaagagttttgttttttttttttttttgagacggagtcttgctctgtcgcacaggctggagtgcagtggcgcgatctcggctcactgcaggctccgcctcccgggttcacgccattctcctgcctcagcctcccgaatagctgggactacaggcgcctgccaccgctcccggctaattttttttttttttgtatttttagtagagacggagtttcaccgtgttagccacgatggtctcgatctcctgaccttgtgatcctcccgcctcggcttcccaaagtgctagaacagagttttgataatttgtttgaaacgaagcactcaaatcttctagtttatttgcatttgcagtcagacctctacagatgccagctagattacagatggctagcataagtttttttcattacagaaagaagaaatttagagcttagtgcggtctattaaaagaattaaaggttatgtcaaaggacaactataagaaagtactttggttctgaatattgcttcagctagggtttattttgaagctcctagcccaaatttgtagaaatgcaactaagatctaatatttagtgtgtaagaactttacaggacatccagtcagtagtagtcttaaaagtgaatcacataggctgaagcaggcagatcacctgagcccaggagttcaagaccaccctggccaacatggtgaaaccccgtctctactaaaaatacaataatcagctgggtgtggtggtgggcacctataatcccagctactcaggaggctgagacaagagaattgcttgaacccgggaggtggaggttgcagtgagctgagatcctgccattgcactccagcctgagcaacaagagcgaaactccgtctcaaaaaaaaaaaaatgtgaatcacatacataaacattgggaatttgcagataactttcattttagggtttctagagcgcagtggtgtaatcttggctcactgcaacctccacctcctggattcaagcgattctcctgcctcagcctcccaagtagctgggattacaggtgtccaccactatgcctggctgatttttgtatttttagtagagacggggtttcatcatcttggccaggctggtctcaaactcctgacctcaggtgatccacccgccttggcctcccaaagtgctgggattgcaggcatgagccaccacacccggcccacttacaggatttttctcccccttcatggttgtataaatgcagtacttggcacataggcaaacctgaacagtttgcaagttgcctacccttttctactttggataaaataaacctcttaaaatagcacttaacatagtaatatatgtatattaatagtagttacttcatgtttgttgaatgaatgaatgaaaaaagtagcaaatctacataatataaatcccaagacagccaggaattttatctggacctaattgtcttacatagcaccaattggtacttaataaaaacaaggctgggcatggcagtatgcgtctgtggtcccagctacttgggaggctaaggtgagaggatcgcttgagcccaggaggttgaggttgcggtgagctgtgattgcaccaaagcactccaacctgagtgacagaccctgtctcaaaaataaaaataaaaacaattagttataactcagatgttgctatctaaggtaagtagtaattactataataaacaagctatatattaacatcttaattttctttcctctgaactttactactgtaggtgtgtagtgaacttcatacaagttaatctttttgtagctctatttcttcatttctgtttgttcatcggttggagaaattttgcttaaattaatgaaagtaaaaatacagatattaatggctcataaatgtgcacaacccacttcatctatagtaagtaaaagtggctcccattttggggtttgaaaatgaagaagatctgaattcacagagaggaggcacgtgtagagatatgagaagttcttttcctactctactttggtacattggtctctaacacatgttctgagcctcagaacacagtagaacagaaccttcagaaagtgttgagagtataactctttaaagaggtttagtcagtctaaattatttgagggcatcatctttatttggtacttagaagtctaaaatcttcctgattgttgttaaggttacaaagagtctgtgtattgttggttagttgagcagtaaatacctttttatcattgttaaatgggttgtaaataaaatatttttcttcagtgttaaaataatttatgatcacaatatttagataataataataataattctgttatttatgatatgtagtcttatcctactgccactcccctcttctgctccacatactactaagtatgacttggtctctataatacgcactaattatgaagttttttacggagaaggaaattcttaatatagactaggattttttttcagttgtcttttaatggccttttattctagtaaacttagatttcttatagacatcggtttattgtgccgagctcagtagctcctagagggagtataaatttaggcaaaggaatcaaggaataaactggtattgtagaagagatgggagaaaaggaaatttttatttttgctttaaattactaaatcatgatgtttcctgtctctcagtgcttaccccaatcagtgtttctctcttttcttttttcctttcagtcccgaacccctaaaattctttgcttgcattaacttgcttcagattataagcctaattttactgttccaaatacatgaacttttcactgtatctccaagtgctcttttagagttcatctctttgttttccagtaactcatatttgtttcttcttatgcttaacacttctctctcatttttttttttcatgtttctcacattttttctttccacattatctgctgtagcaaacttgaaatatatgcttttggagaagagtaaaaacagtgtttagccatattcaggttattagcagcagctcctctttcttcacatatacttaaagggaccagaaagttatttaagctcttacttgctacaaatgctgttccatgtgctcctatgagtcagcacaacaggtattttttttttttttattgtacagatgagaaaactgagactttgagacattctatgaattgcctgagctagttggcagcagtgccaggattcatagaaatttggagcaggaagacaacacaatgaagattttactttgaggaatttagggttcatctatgtaaagtgatttttctgaggtcactaattatgttgtaggctagaactcaagtctcctaactcctaatatagtgccttttttttcttttctttttttatttttttaggagatgggtctcactatgttgcccaggctggtcttaaactcctgggctcaagcaatcctcctgcctcagcctcccaaagtgctaggattacaggtgcaagccaccgcacctggcctctaagagtgctttttcctagcatacttttcttctcctaaggtaaaaggctgtttgtcatggtacagctacggtgattttacttgagatatttgactttgagatggagatgaagataagtatataatgcagctgccacattcattctcatacaaggtaaagtcattcaaaagataaatcgaagaactatagatgtatttaagaagaaattcagcctatatgtaacaacaaaattttgaataatcaagttcagaaattggatttttaaaaacttattagctactttaacccttttgaaatattcccaaaaagtgttttctcttcctgagttaaatttattcatttattgacctattaaagatttttttagtgcttcagagctattctgtatatctgttcattttcgttatttagtagtatatagaagtaatagattgggctgaatagatttatttcaggatatatcttagatatttgtgttttttcatgaatcccagtttaagggttattgctttcaaaaggaagaaatttggttagtcatgacttttggctagttgaagtttagagaagtgctttatacaggatcttttatttagtgagaaaaaaataactttttataattttataatactgtgtgaaaaacctgataccaaaacttctgaaaaagaaaccaggcctaggagatgaggattctagggaagattattaaattgaggatatttttaagttagattctaaattagtaaatcgtggctaataagatgaaaataatctgatcctttagtaagatctgaagtaatattgttgccctgcaaaaaagtggttgttatcagcataccttatatgtcagcctaagcaagattagattttctcttttctctgatagatgccaatatttaacattgacttttatctactttcaaaaatatctatgaaatatactttctgtctctgaattagagtgtatgtatatttgtgtttacttgaaatgttatagctggatgatagatttcagagcagtttttatgcttagggaagccactgcctcccaaaaaggttttcttatgagaatgaggaaaataagtataaattttcatatttatgttattactattgatgtgcttggataattgtatttataaaagtaaaaaatgttcagtattttatctgaaatttaataatggatattgtacagcctaaggaattaaaagaaaaaggaccctttgagaaaatggcttgttcttatgtatcttaatatatactgtgttcactttatgttttgtcagacactgaaattgaggaagagagattttggcgttctgttggtttatggagagagttgatcagagattgctccttggctgagttgctgtctgcataggctgttaacaattgtttctctggcagcagatcttgttcatcaggattgcatcatttctgggagaatggccaaggtccacagcctcaatacaaagactgtctgaagcatatgaggcctgttctctttctgaagcggcactcctcttcctgccagtcctcttcacaggattactgaagcagacttgttctgaatttctttcgttggattggttgtttattggacttttgtctgccagctgcttccgcctcacctgtctgatgcaatttcttcttctgaaatctgttggaattgttcataaaacactttttgtttgtcttctctgtgagtgaccagggagatcatacaggtcttgtgctttcagcaagtcatatagagaagagactgtcagaatgatgatacagagactgttggccatttctgaaaccaattaaaaagatggggtaattaagaaacatttctggcatgttctatttaacatccttttccctagaaactgtatgtaaatggcacctcctaaagagagtactcggtactactggaagatacaggctgtgtctgtttctgaatccaagaacttactagtgttcctgtggattctgatggattgttctggaaatagttaaattaataataaattgaaactgtgatgcattcatttaccccctactgtacactcacatctatttcgctgttttcctcctttcctttttttctttcttatttgctattgcttcttccttgatttactttatttcttccttccttttactgttactttgatacttttatttctctaattctgggtgtactattttaaatcgtttctaaaaaatagtttattttccagttttttaaaattagaaatcataaaacatcaacataaatgaaatgcatgcgttctaatgcttggtaactggaatcctatgaatagctcttttcatgtttatgatatgttaatctttaaggtgttaataactctggctagcgttaaatttgacttttaggaaaaaacaccagagacttaaaggatactgatcattttcccttcctttttggaaggtagaaaattaatttaagcgccattttttaagcatgtttccatttgaccgcaaatagaactgactcctttttatcactcttttttatagtaggacaagaaactagatggtgtggaatgaagggaaagaaaggagtaataaatatggacttgtaatttaatgggtgatgatggccccttgtctggctggacagttgtcggacatcgggttaaagaaagaactctgaatttgagaagtgttcagtgaagaagggaagcaccttttaggagagagaaaaagaagggatcccttggaaaatgagataattctaatttgaaggaagaggaaaaattagccagtgacataagtatttaccatttaagtcaaataatttccttctctaccatctcgtttctggctttatggaaaaataaaaaattaaagggcaaaaaattcagtgccggatggacgtagggtggtaaacgagatagtatagatgtaggatgataaacaagacagtatacagaaacataatatagctgtagaattccattctgtgtgttcatcaatgttatttctttctgtactaatttttgtctcaactttttctaggtcttcagaactactagcagataatttggggggacttcatattcagaagtctatataaaggtgactgacccaagtaaatccttttaatttctgttttattttttgcattttaatgactgctggaatcatgttgtagtaaattgtgattataatttacttagcagatatttctggaacttctctacgtgtcagttattgttttggccattgaaactacagcagtggataaaaatccctgttctcatagagtttatattctggtaggaaaaaacaaacaaattataataagaaaatactgcatttagatgatctgttaaatgttcctcggttaacattttaatagctacattttacagagttacttagggaaggaactattcttagggtaatatttgagaaatttgggattattaacagaatttgaattaagaagcctcatcattattaaagcattagttagaatgagatggtcaagctaacctattatggttgctttcatcagaagaatgaaacagtcatgttaaactagacacaaggaaaatggaataatttttatgaaatagaaatttatagttaccgacaatgtttctttttttttttttttttttttttgagacagagtatcattcttgttgtccatgttgaagtgcaatggtacagtcttgactcactgcaacctccggctcccgggttcaagcgattctcttgcctcagcctcccaagtagctgggattacaggcgtccgccatcgtgcccggctaatttttttgtatttttagtagagacagggtttcaccgtgttagccaggctggtcttaaactcctgacctcaggtgatccgcccacctcagcctcccaaagtgttggaattacaagcgtgagccactgcaccgggctgacttaatgtttcttaaggattcatcaactatccaaaatagctgggttggtgtttcattagtgaatgtagcaatcatttattcactcattaagatgttatctgaagtaacttttccatcttttccttttagtatatcttttaaaaattgctctaggaaaaatatcaactatcatcttgggtttataacttgtcttttatctagaaactgtactttttttttttttttttttggagaaagagtttcacttttgctcaggctggagtgcagtggccctgtctcagctcactgcagtctctgcttcccagattcaaacgattctcgtgcctcagcctcccaagtagctgggatcacaggcatatgccaacatgcccagctaatttttgtatttttagtagagatagggtttcaccgtgaaaccatgcattttttaaatgggtgtacagtcgtaatggctacaacaaagggtttttaatgatattaagtacggtttttggtttaagtcttttactgaaaatataaaacaattcagattccctttgctgatcaggggaggtacggtgataatcagactttcatatgattatctggtcagacagctttggggcttttcttttaatctgaattatacagtaagactaatagaaagagtagtgaccaacagcccccagtatttaactgtcttttgggtttacttgatgagtgttcttgttttatcatttacagattttacttcaatttcccaaaggcttagaagatgtactgccaaggtctctgtttggatatactgttagggaaaggaaacatacatgtgtaagactggcctaaaggcaaaaaagttcatcagtccctttttttttttttttttttttttttttttttttttttttggcaacagggactcactttgttgcccaggctgagtgcagtggcatgatctcagctcactgcaacctccacctcccaggctcaagcaatcctcccacctcagcctcttgagttagctgggactacaggtgcatgccaccacaccagatttattttttttttttgagatggagtctcactctgtcgcccaagctggagtgcagtggcgtgatctcggctcactgcaacctccacctcctgggttcaagagattctcctgcctcagcctcctgagtagctgggattaccagcgtgtgccactacagctaatttttgtgtttttagtagagaaggggtttcaccacattggccaggctggtctcgaattcctgacctcaagtgatccacccaccttggcctcccaaaatgctgggattacaggtgtgagccaccgcgcctggcgcacaccaggtaaattttgtatttttagtagagacaggatctcgccatgtttcccaggctggtctcgaactcccaagctcaagcaatccacctgcctcagcctcccaaagtgctgggatgacaggaatgagccacttcatctggcccagtcatttcccagcccagctatatgtcacctccaattgggtgtaggaacaggcgtattgtcatacccagaggtctcacttcatcatctaggctggagtgcagtgcatgattatggctcacctcagcctctacctcctgtgctcaggtgatcctcccacctcagctcccaagtagctgggaccacaggcacacatcaccatggctggctgatatttttttactatttttgtagagttggggtctcactatgttgtctcagctggtctcaaattcctggactcaagtgatccttccaccttggcctcctaaagtgttggtattacagttgtgaaccactgcacccagcccacaattttttttatttgcattaatatcaaagtaagattggagcatctcagaccatctaccatttacaatttacattaaccggccaggcacggtggctcacgcctatagtcctagcactttgagaggctgaggtgtgagtggatcaccggaggtcaggagttcaagaccgcctggccaacatagtgaaacttcatctctactaaaagtacaaaaattagccagacatggtggcaggcgcctgtaatcctaactacttgggaagctgaggcaggagaatctcttgaagccaggaggcggaggttgtagtgagccaagattgcgccattacacttcagtctgggcaacaaaagtgaaactgtctcaaaaaataaaaataaaatttacattaaccccctgggttgactcagtcggtatcatgtacttttcattcctttagtttttttagtattaataattgttctaatgtcttattatgaatcagtgtatcagtcatgactctctttgtagtcttttttgcaaaagtccttgttaacatgggtctttgacattcacattgactttattcccccccaaataaaatgctttttgtttcatcctttcaatgttttttacactactgtaaaactactaatgtaaagtcacacaaagaacacttgtttccctctgcaccatacctccaaatctcttaatctatttttgcatttttttatacttcagtaatttctgagtctttctgttcccagctttcactggtttatggtcaccatgtcaagctatcctcaccgctttttcatacacagttgtttagtctttatcatgaaactgtactcttcgtgatttcgggggtttttttgttgtttttaaaaagtagtcaacttttttagagcagttttaggttcacaggaaaattcatcaggagatacagagatttcccatgcaccctctgcacccacgcatgcatagcctcctcctggtttatatttttgttcatatctagcagcgtattattaccccacaaataaagttgctaagatgattgcatcttctcccaaaattatagttaagatgatttaaaagaaggaagagagtgttcaatgacaaaagaaggcactaagaaacagctgtttccaatcaagtataaacaacaaattgatctcttttaatttggaagaaataacattattgactgcttgtgaaactgcatttatttgtggcctaggaaaaaaacttaaatgaagatcttgaatttttaaagagtttaggtaaactgggatatttttaataaccatcctttatcttaaaacttgtttgctatatcctaggctgccagaaaattttgtttgggcagttttagaatggggagaatgtgttggttagtgagataggcagactcttcctttcccttcaactgaaaagaaaaacaaaagtaaacataactttttgccccctactttgtgaaacattaatgaaatgcatagtaaacatgggacactgtggctgtatttattttataattatcccttaaaagccttattcaagaatgcagaaaaatattcagtaacatttaagataaacttgaagaactatctgataactaggtatttattttactagatattttccttttctgttacaggattcctcatgtccataacatgttggatgaggctctgcagctcacccccactctcagagtggtcagtctccattaattggaccccgtgatttccaatctctgctgtgttggacgtcatgagcattgcaatccctctgggagtcaccacatcagatacatcctactcagatatggctgctggatcagagtaagtgctactttctaggtagtaggtacattatcagtctgtgtggagacagccttcttatggatagctaataggataatatgtagtattttcttaaccagatcctattccactgtaattaacattagacctttccctttacccccattgaaggtggtggaaaaaaggaattagaaggggaaggaagagttttcagaggggtatttctgggcaaataattaatagaaccaaagttgcaaagtaggaattcattttcatttgttttaatgggtggagaaaattggaataaagtaggtgttactacctgcttctgtagagttaatgattctgatggagggagataagaaggtgttctttccaactgattttccttgaagtcctcttcctatgtacttcccattgttctagagtaaaggggccgaaactatatgggcaggttgcctagaccttctgacatctggggtagaaaacatggagaacagcgtcatctgtttttttataatattcgttgcctagaaagaggaccttcaaaatcagtggtaccaaacttttttttcagctaagagcagctttaggaattcagagtttgtccaaaggcccaatccctaaaattatactctcaattcttgaagaatgtaaatgccaaatgacaatgaaggtaggccttcattatacaactttatatatattattcacagttttaaaatttttagtcttttgtatcccttctcttttaagttgtccgagattccccctgctcacagattccccctcttgtccttttacctcccttgtacccaatcttccttgcttacagaaaggaagtggaagccccctacctttcaagacgaagtggcactacaccaggatgtgaaagtccagcgaaagagacccaaggggcctagggggcagcacacccccagaagccaagtctattccaggcagtaccagggattagggtctgggctggaaaaatcctggtgttttgaatatgttcaggtccagttcagactcttgatcccacagccacttcttgagtgaggtgggtgttgctctaattcccctgtttctcttgccattttcacagtccctggggattcttcccccttcagcaaagcaaagcaactgtaccagatttctgggttgaatgacatccctgattaataagtggttttcttccttaaaacagaatattattaaagagcatgtatatttcttcataaagccacctaatataacttacctgtttactgagttccttaaagaggaagacttaaagctaccctgagaaatagtatataatattctggggtagtctaaaatgaaaagcagtgtttgggcttattcccatataaaaaggagaaaggagggttgggggtggggaagggttgattttgtttcttctagagcttttttcttcttttgtttttgtttgttttgttttgtttgcatgcaaaaggtatttagttatgtcagtaactgagacttacttaaccattttacaactctttccccaaataaagtacttaaaactctccctgcattagtaggtagccagtttgtattgtgtttataggtttttataaagtcagctactaacctggtactatgtagattgtctaactgtatagatagatagcattaacatttgtgagaaat

SEQ ID NO: 344 - DNA, 32765 bp, Homo sapiens
  source 1..32765: mol_type = genomic DNA
ctgtgttggacgtcatgagcattgcaatccctctgggagtcaccacatcagatacatcctactcagatatggctgctggatcagagtaagtgctactttctaggtagtaggtacattatcagtctgtgtggagacagccttcttatggatagctaataggataatatgtagtattttcttaaccagatcctattccactgtaattaacattagacctttccctttacccccattgaaggtggtggaaaaaaggaattagaaggggaaggaagagttttcagaggggtatttctgggcaaataattaatagaaccaaagttgcaaagtaggaattcattttcatttgttttaatgggtggagaaaattggaataaagtaggtgttactacctgcttctgtagagttaatgattctgatggagggagataagaaggtgttctttccaactgattttccttgaagtcctcttcctatgtacttcccattgttctagagtaaaggggccgaaactatatgggcaggttgcctagaccttctgacatctggggtagaaaacatggagaacagcgtcatctgtttttttataatattcgttgcctagaaagaggaccttcaaaatcagtggtaccaaacttttttttcagctaagagcagctttaggaattcagagtttgtccaaaggcccaatccctaaaattatactctcaattcttgaagaatgtaaatgccaaatgacaatgaaggtaggccttcattatacaactttatatatattattcacagttttaaaatttttagtcttttgtatcccttctcttttaagttgtccgagattccccctgctcacagattccccctcttgtccttttacctcccttgtacccaatcttccttgcttacagaaaggaagtggaagccccctacctttcaagacgaagtggcactacaccaggatgtgaaagtccagcgaaagagacccaaggggcctagggggcagcacacccccagaagccaagtctattccaggcagtaccagggattagggtctgggctggaaaaatcctggtgttttgaatatgttcaggtccagttcagactcttgatcccacagccacttcttgagtgaggtgggtgttgctctaattcccctgtttctcttgccattttcacagtccctggggattcttcccccttcagcaaagcaaagcaactgtaccagatttctgggttgaatgacatccctgattaataagtggttttcttccttaaaacagaatattattaaagagcatgtatatttcttcataaagccacctaatataacttacctgtttactgagttccttaaagaggaagacttaaagctaccctgagaaatagtatataatattctggggtagtctaaaatgaaaagcagtgtttgggcttattcccatataaaaaggagaaaggagggttgggggtggggaagggttgattttgtttcttctagagcttttttcttcttttgtttttgtttgttttgttttgtttgcatgcaaaaggtatttagttatgtcagtaactgagacttacttaaccattttacaactctttccccaaataaagtacttaaaactctccctgcattagtaggtagccagtttgtattgtgtttataggtttttataaagtcagctactaacctggtactatgtagattgtctaactgtatagatagatagcattaacatttgtgagaaatttcaacaaagaggttaaaccaatacgtttggaattgctggataaaagacccagagcagttaatcttacaattggtgttttccccaaagtatagacatgactgcccgtaaatactgctggggagtctaggactaattccagaaataaaaatacttctggtctacaaatgtgactgcgctgtctctgttaacaccaacatatcctaggatttcctgaaacattttcattcatgatctccagacagatttgtgatactgtggtcataactagctacatagttatgcatttctgcaaagggaaagaatgtcagtaactagctacataccattctgttaaattattaatgatatttattaatgtttcatcatgcctatttcgctgttctgggcactttaagattaaacctggtattaagtgcagcatactcaactagatgtagacttcacttcatagaattttaaatctgatggcaactatatgcaatacgcatttatttttgtgtgtgtttgtaggaaaatttgtagatgtaacaagcaaaacaaagatttttctgaatttccaactctaccataacagaatttcaggcattttccaagaaatggcatgatagcagctgggttgcatgttgtacttagaacactgttgatggagtatatctgttgtgagcctggtttctgtgtatgtgtccaattcagtgataggagaagaaagcctgtaattacatttgcataaagtggttggctgctaaagagatgtaattccattattccaaacttttaattcatattttaaaatataaaaactagtatatatatcaaggaatattttaggaaatcttgtagttacctgtaagtgtctaactgtgtattcaatcagtaaccaatatggaaattgcagagtttcttcatcagaagatatgagtttaaattttatatttggcatgcacagcaatatattaaatgctgtgcttaactagaaagtattgtgcagtgtgatggccttttaacctccacaatatacattttatttttattccctagacttgcacatgaagtgcatatgttcatatttacccgtttggagatgggtaagatacaaccagcatagctccatctccatggccatctttgatttcatgcaactttcctttttcctgtccccctcccaccaaaaaaaaatccattcctaataaacagctatcatgtttcactccatgtgttcagtggtacaaaacctatataaaatatgtacagctctttggaatacttgtttatctagtaatgtacctagtaaattaacaatgttgtataaatttattactttcttttaactgtccatcatagaaactaaattataccttcattttattaatgcttgtctgcctttggtttcatttaggaaaccccacctgtttcctaatactcagagatgattgcctctcagtgagccatgttcagatcatctttttctcaagaatactgacctgcattcttgatgtacccctcccccgttcccatcttgcagacacttttaagtaataaaatgcatgcacctcactaacagagaatactttcctctgtctaaagttcttcacttagaaatttcctttgctgttattaataagatcctttctcacagttttggagcatataactgggtgagttggatacatatctcagaattttctttgatccctcacttctcaattgacattgcaccacattgaactgcacacttattcctgctgtactatatattgtatatctttaagcaggaaaaaatgacttgttatttcaagcgaacaatatgcattatttgactccctgaaagacccattaatctctaagttagagttataccaatcatcggagtttctaatttgtgaatctgtgttctaattaatataaattacaaattactattctattctgcaaagccatacaaactttatatttttgaattacccttcagtattccctaaaacctaaccaggtaacaatcagagttgaagttctttcttcccataaacctgatttttatcctttgccatcaaagcctttttattgtaaaggcttatattaattttctaagtttgaatacatgtataattctacaataatacattgcgcttgaatagtttattttctactcacaaagggtacaaaaagatactaaaccaagcttctcactaagcctggttaataaaggtctcaaataattttctttaaaggactgaatgtcattctcatttctgtagtggaaagagcatagactttggagtcagacagactttgtttcaaatcttagctgtgtcagtgtgtaaccttggggaagtcatgtaatctcaccaccacatcttcccactctgtaaaaatggagtatataccatgtttagtggttgctgaaattaaatgaattaatatgtatttaaagcacctaacaaatattgggcagttcacaatggtagccattactgttgttattatttgtcagtagactaacataactttacagtttagtttttattttgaagttctatggtattatcatgcagctgataaataattttgtccttaatatgcttgcatgtcattggtggatgagaaattattactctaatatttgaaaggtgttgggggttcatcaagatgagaggtatgataaatataagatgccattgtttttacctgtactttcttcagggtatcctgtcttggtagtgaatggaagagggcctggtccctggggcagtgcagaaggcactttgatcatctcactcactgcaaatgtcatgtgaggtttcatggaagtattaagagatccaattaagaagaatagttctgagtctaaaccagcccagagtggcttctctaggggaaactccccgctcagctggtacgtttgtgtttgtcattagggacaccttgtatctcaggtgcctgccttcagacatctgcctgtactggcttcatgttacacacaaatccacatttaataacactcctactgttatttataggcttagttatgttaataagattgtttcaccgagttctttctcttatcctagtggctagtggttgtggaaagaggaggggttagaatgggaaatgaagtgttagtttaagggaagattaggtgttatgctatcatgcattgcttttcgcctttgtgcagccctgaatctgtggaggctagtccagcagttaatgagaagagcgtgtattccactcataattatgggaccactcagaggcatgggtgtcgaggactgccttatgctgtgagtatgcatttgtttctctccagaacagtgatcttcctggagtgtaatccattcttatacattgtgactttcttgaaatgtttatatgcagcatgacgaagttgccccttttgcacttccctgactccagcggacgtctagccctgcatcattgttcttgtttttatgtcccagttgaccttggcattttgttttatcactttcctggttgaagccaaaaaacaaagggtactactttcttctttctttccatatgtaccatactttaggggagagaggggccagtgtttggacactgttgatttaaaaaatcttattttcaggatcataattacggagcccctcctcctccgacacctcctgcttctccccctgtccagacgatcatccctcgttctgacctgaatggcctgccgtcgcctgtagaggaacgctgtggagacagcccgaactctgaaggagaaactgtacctacctggtgtccttgtggtctttctcaggatggcttccttctcaactgtgacaagtgcaggtaagatcctgttccatctaaatttaagtctgggttgctgggattagggtttcttacaagtagggaaaagctcaaagtattctttcttgtgtttgttaatgtagatgattccttagtgctccttggctcgaattctctgcactaggtgagaattgctgacaacaaggaatgagagattgatgttaaagctattgaatttgatatgaaatttaatgtcctggaaacatttggtaggtgggagggagggggtagcatatgcagagacacttcgcccatgtgtgctatgatgtgatgcatgctgttggaaggactactttaagtttattttccctctttaggggaatgagcagggggaaggttattagacttcatcggcggaagcaggacaacatatcaggtgagcggaagatgggttaggtccacaatttgacataaaaatattctgtgatctgaatgttcattttaagaacccctcttggccaggcgcagtggcttacgcctgtaatctcaccacttagggaggccaaagcgggcggatcacctgaggtcgggagtttgagaccagcctgaccaacatggagaaaccccatctctactgaaaatccaaaatagccaggtgtggtggcgcatgcctgtaatcccagctacttgggaggctgaggcaggagaatcgcttgaacccgggaggcggaagttgccatgagctgagattgcgccagtgcactccagcctgggcaacaagagcaaaactccctctcaaaaaaaaaaaaaaaaaaaaaagaacccctcttacaagttcccatggtcccccagccagctcttttcacagaaagagatagaagtcctctcaagaccactgtatagttctctcattgtaaacgaaatgtgttgagaacagtttagtcctgtagcaaagtattccttgtgaacacaaaaaatatggattcctgttttaaaaattagccagtctcaaattgttatagattgagtcagcgaagcttagggactgaatacaaggggagaaataaataccatgaggaacagggtttatatgcttaatgccaatgacatagaatcttgttttcttaaggaagatgagtatttaacgttgctttacagatgataagagttaatagtggaagtaatggcttactgcatgtggggcacacctaaaagaataagctacttttaatgtacttttgaggctattagtacctgaactatgaaatcatcatttttcaggtggggatagcagtgcaacagaaagctgggatgaggagctttctccttccactgtgttgtatacagcaacacagcacacacctacaagcatcaccttaactgttagaagaaccaaacccaagaagcggaaaaagagtccagaaaagggtcgtgcagcaccaaagacgaagaaaatcaaggtatgcagggtaaaaatatcttaaatagaaattgtctgaaatagcttaaattttggagcaagaatgcaccaaaattcttttaagaagtttgatccaggtgtttgaagggccacttttgttctacttgcaaaaatcagctaatctgtgttatgtacatgtagaccaacctctcttctgccacaccatatcatcaccactggctcaaagtttcttctactccagtccccatcccaggtatgaaattccagccctacctggcacaatcccgtatgtgttgcagcctcaagtctaggcttccactatccttacagtatctccccacctctcaaccccaaagtacagtctgaaattcttgtcctggttacatgcctcatgtctttgggttgattgtttttccttgtttcaaaaaaaataaaaatcaggaaacatctcttgtatggtctaggtttcctcagtgtcatggtcactttcctgtattctcagctaaaatgtctacgggagaaacttcttctggtttgtgttctttcttccccatcacagcaactttgttgcttctaggtgacttgttcatcccttgttaaggggattggtctttgtttccttcttagtttcaaaactggtaaatctgcaactttaaagtttttttttatttactttttctcttagtatcagaggtgcatataggatttaagagatgcatgctcttccctgttaattacctagcttcacagtagaaagtattaaaattagtctcagagttcattggccttgagctacccctattcttggtaatagtttggggaattccattgtattttttacctagagaaagggggacagaatagaacactagtttgtgccttagttttagtctcagataggtataactgtcattcttggtaccaagttttgtttgttctacttgttttcctccttgggataggcatttcgagagggatcccggaagtccttgcggatgaaggtaaggggtaatcttcgctgatgctgtgttttacttcactgtgatcttgcattttggtcagcttctttcctgacattgatggtctgggaatcttggactctgcttttcattagtttgtagttgttgccattcagttttcatagagcttttctccaaagtagattttcttggccattttctgaaatattttccctttctgtaatcagccttcattgattggtttttcattcattgctttcctagggggtaagtgacatttttccaaacaaaatgaggctagtgtgttctgtcactgtgattgaactcaaccttaggagtggagtttttctggtaatgatacaggatctcttgtgcatctaccctagcactgtgtgggctttaattgcaggacgcttgtattattgataagaattactgttttctcttagcatatctgtttggtggaaaaaacttaggtaatgctagcatgtttcttaagatatcaaataaaagagtttatgaagtatgattttgtaaagaacttggagaatagagcaagtatgtggaatggtttaaaagaagtgtaaggtgctggttgattaaaaatagcttgccaaaaggagatttgattatgctgtctggtatcctcctttacgtgtgtgtgtgtgtgtgtgtgtgtgtgtataaatatatatatatgaggaaaacatgcctctcaaattattactgggggcttcaaagcatttaaatagaattaaattcaagtttatgagtattcatattcctaaatgatacaaaagcaggatctttcctattgagagttatagggcataaatattaaaatctttagtaaggccaggcgcagtagctcacgcctgtaatcctagcactttggaagaccaaggcaagtggatcacctgaggtcaggaattcaagaccagcctggccaacatggtgaaaccccatctctactaaaaataccaaaattagccaggcgtggtggcaggcacctgtagtcccagctgcttgggaggctgaggcaggagaatcgcttgaacccaggaggcagtggttgtagtgagccgagatcacgccactgcactccagcctgggcaacagagcaagactccatctcaaaaaaaaaaaaaaattcagtaaggataagctttttaggattgctttatgtgcagcaccagtgtgactggtgttagcaaagattacaggtagcactttacctaaagtttgaaggccccacttagtatctatctttaaacagacttgcacatacctgtgaaagagttgggagaggactcagagctacagagcatcagaggcctgggatgtgtcttggaagacaaatcaatcatgcctttgctggatccgtctcttgcaagtggccaagtttgctttagcttcccctttatttttgtctcatttgcttagagaggggccttttaaatagactttggaggcagataatagccctaatcctggctactaaatgcttttctcttatcaagcaactatcataacttatctccagaagctcgaaacctttcaaaagctataaactggctctaccagaaaactgcacataaaccccatattttgcttacagttttgggaggttgacagcctcacaggtgtgttaaaatttagaaaaaaaaattactagtcattttgattcttttaattctaaattgagttataaattttatgctcagaattactagtttaaaactcctccagtgatccaggtgggagccataagaattagaaaaaattatcatttggatttttaatcccagtgtcaagagcagcttccctactgaagacttaattgtaaatcagggtttctcagtcttgacactgttgacagtttggaccagataattctttgttgtggaagggactgttctgtgctttcaagatgtgaacaggatccctggtgtctacccactagatgccggtaacactcatacactcagttgagattatcaaaaatgtcttcagatattaccaaatgtcacctgggtgcaaaatttccctcaattgagaaccactactctaaacccaactgaggtagagtctctaatgccttgaaggatgggacagcagagtaaacacacagtgagattagcgaacaatggctaatactgtgacagaggcttccagaatacagtacacttatcaagtgtaagtttaacaattgccacttaaagctgggaatattgtttggacactgccagtccccctagtctgtaagctccattaagcctaaggttttgcactattcttttgcgcaactgctactgatgtcaagcaggcgatactctgattgtcagtatgttggctttaggtgtttctttagatccctttgtttattgttcagtcttttggactctagtaagaaatgtggagacaatagtgttgattttttttcttctatactcctgttccttgcagaaaggatagtagacaataatcagtcagcaacagtgatgcaaaagtggtaaaagaaagtgttatgataagcatcagtgttttctgtgccattcatagaaagtatatttaattttattgtacctgtttgcaagtttaatgtggacatggattttcaagtagctttggtactacagtgtcttttccttctaatcatcactagcatgacatcatcactgtcagtgtttgttttgttttctgatggcacttaagtcttgaacaccgtggaggagaacatgtattgggcttatgctttgtctctgtagctcaggcactgtctgcctaggaagctgttcctgagttgtagtaatcttttctcaatactgtcaccatagagggcaatggttttcctagaggagtatagcaaagtacctcctagacattttctatattctccctacctactcctctcccctcacttcacctcttcagattatttagaatgtggtaatttaaattgttgaaaatagagtgttagaaagatatactcaaataataactttttatatgggtagtaagattgggattggattaatgagattgattgattaagatcacatctaggtttagaatgaacatgtattatgaaaataataagtgatacaaaaacatgcattctcctggagaatagtcaaaaaaccagtttgggctaacacttaacacagatattcagtgagtatgaaaaatttaagcagtgataaatttgaggtctctactgttcatttgtatgaagattttcttatgaacttgatgtcagtcctttgattagaaaattgatttttatgactttaaaatggtcataaaatcacagtgatgggatgaaactatgatccagattaatttcttactttataaatggagaaactgagcttccccatttaaagaagttattcaaggtctcacctctcattggtaacaaaagcatgatagaaaccagatcctctgactcccagtccattactcttttatgccacatcaattgccaagtgataaattttctctggaaccccagcttgtcccacccccattcccaaccctctatttatgcatggactttactaacctccctgaatttgttttctacagaattctccctctgaagcacagaatttagatgagaatacaactgagggctgggaaaatcggataagactatggactgaccagtatgaagaagctttcactaatcagtacagtgcagatgtacagaacgcgcttgaacaacacctacattctagcaaggaatttgtgggcaaacctactattttagacactattaataagactgaattggcctgtaataacacagttattggttcccaaatgcaggtaagcaccaaagggttgaggactctctaagtagctgaaattttaagaacccaggaagagggtaatggattggaattactgttccttccaaatgtacaaggccatggaataacagattagccaggtgttgatcatatgtaaccaaaagtaggttatattaactggaaactacctggatacatatttttaaactacctttattaataaaaaaatagatgaattgaggctgtgtgcagtgcagtggctcactcctataatacaacactttggcaagaagccaaggtggaaggattgcttgaggccagcagttcaagaccagcctgtacaacatagtgagaccctctctttacaaaaaaaaaaaattaaaagccgttgtgatgatacacacctgtaagtcccagctactggggaggctgaggtggaaggatcacttgaatgaatttgaggttatagtaagctatgattgcaccactgcactccagcctgaatgaaagagtgagaccctggctctatttaaaaaacagagagagagatgacttagtatgggaaattctatataccctaggtaggaattatgtaatatttatagaaagttaagcatgttctttctcatctttattttagagatagagtcactgaagtcttaatcatgtattttttttttttttttaatattttcttgccgtttctggggaggcaatttcactagatgtagcatgtctcttagaaaaattgagctttcatcacattttaaaatttctcatcattgatctaaataacatgtacagataaaacctgaaaatattagcatgttttccttaattatgaagtaatttgagtgtctactaaggtgttcttgctgttgtttaatgttattgctctggttttattcagttacagctgggaagagtcactcgtgttcaaaagcaccggaagatcctgagggctgcaagagatttggctttggacactcttataatagagtatcgtgggaaagtcatgttacgacagcaatttgaggtcaatgggcatttcttcaaaaagtaagaacgtcattcattgagcagtgagggctaaggtggacctggttgaccagtgttgttgtaaaaatcattctgtttgataagacgctcttgggagaaaaaaatcacaactcagataagctcacacctgtctgctatttgtagagaagtgcaagtaaatcttcaaattgttcaatgtataaaatggtgacacctcctttccaagccaagcattccttgctttgtgcttgttctttaatcaaaagcagacaaacgtgatgctttcccaagtttaggcgttgcaaaagactgctgctgcttctctcagcatatgcttcatatttggagtcatggggtggccttcttatttgtgttgagaattacaggaattttaattgtatccctagaccatacccctttgtgctcttctactcaaaattcaatggtgtagagatgtgtgtggatgcccgtactttcggtaatgatgctcggttcatcagaagatcatgtacaccaaatgcagaggtaagatatctgtagcaacttccctttgactggaaccatcaaatgacaagcttactgaagaagcagtgtgaaaacttcactcagataaaggtctgtagataatagtcgtgatatttcatcgtgggaggtgaaaaacaaaagtaatggtgcttttatacgacaaaatgggcgcaaggaaagagttttctttagagaaggcagaaatagaaaagagcaagttagcatttgctaaggagaaaaagctagactggataagaaaatcaagtgtagttatattaaagagattgccatacggtggaagtagatgttgttaggcctaactaagctatttggttgcagtttttttagattttagtgagtaatgttttatgagaggatctagacatttctagaattcattactcagagcaaccacatcaaataaagcaagaaaatccacagagctttacttactggctaaggaattttaattctctggtggagctggaaacagctataagatgtgaaagcggctgggcgcagtggctcatgcctgtaatcccagcacttcggaaggctgaggtgggcagataacaaggtcaggagttcgagaccagcctggccaacatggtgaaaccccgtctctactaaaaaaaaatagaaaacttagccaggcattgtggcgtgtgcctgtattcccaggtactcaggaggctgagacaggagaattgcttgaacccgggaggcagaggttgccgtgagccgagatcacgccactccactccagcctgagcgacagagcaagactgtatctcaaaaaaaagatgtgaaagtagagattttaccctgatttctaacatctcaaggtttctccacatatttaagaaagtattataaattttcaagccagtgcagtataatagtttcagatgaaatgaaggggttaaataacagattaccataactccttaaataaataatagattaccataactccaaatggagagaaagtatggtttttttctctcttacggaaagttcatggtctttatgaaaaatccaaccagaagccttttcacacaggtgcgacacatgattgcagatgggatgattcacctgtgcatctatgctgtgtctgccatcaccaaggatgctgaggtcaccatagcatttgattatgagtatagtaactggtaagacctcagaaacctttcctaacaggaatatccatgtcttacatattaagctattcactctatttaaagtctgctcttgtttcttgccttttcctttgtttacttaatcttttcatgactaatgaattttctgcctagaaattgtaaaggaaaagacaggcaagattttttttagagatacggataccttgtatgatactgctcacaaatttcctgacagaagtgttttcgcttatgcctttttagcaagaatagcaaaatggatatatatgtatgtatgagacactcctggaaattacaatagcatcctgttgttatgcacagagtacttatgtcagggaccatatagaatgagaatttaggccaggcgcagtggctcacaggcctgtaatctcaacactttggaaggctgaggcgggcggatcacgaggtcaggagatcgagaccatcctggccaatgatgaaaccctgtctctactaaaaacacaaaaattagctgggcgtggcggcacacgcctgtagtcccagccacttgagaggctgaggcaggagaatcactcgaacctgagaggctgaggctgcagtaagccaagatcacgccactgcactccagcctggcaacagagggagactctgtcttaaaaaaaaagagagagaatttaatatgttacctctacttttaatttgtcaattatacccttataaagctaggggtgagatttaaagatccaccctgtccacagaaaccatgttatctagctgtatatgacagtgcagaaaaccataaagggcaattcatagatgaatatgtgggattttttaaagtatatgctttttgttctttggtcatttggggcaaaatagaggttatgtggtaaagtgatgtttggcccaggtataaggaaaaaagatgttctgcttaattcatcaaggaaaataaaaaaggttttaagaaggttataaaaggttttaagaagtagggaattagtaggtaaaagtgaggacatggtaatcgtgggcacaagatgagtatggccacatcagactttatcattgataaactgcctgctaaatagccaataaaccactggggggattgaatttagggagggctttcttttttttttcccactgaccatggagtagaattggggttacacaaagaaagacagaatattgaaagtgttacgtcaggcgcggtgactgacgcctgtaatcccagcactttgggaggctaaggctggaggatcacttgagcccaggagttcaagaccagcctagacaacatggcaaaaccccgtctctgccgaaaataaaaaaattagctgggcgtgtagtcccagctactcaggaggctgaggtaggaggatcacttgagcccaggaaacagagattaccgagagctgtgatgcaccactgcactccagcctagatgacagagcgagattccgtctccaataaaaagaaaaacaaaagtatttataggactctctaatgtctctgtttaacttattcagagacaatatcagaggaagttactgtactgatattttaagagggtgaatggataatgtaactgaatttcaagggtactgagacaggcattttggttgtttctttggagcagtaattataaagtggactgtgcctgtcacaagggaaaccggaattgtcctatacaaaaaaggaatcctaatgctacagaactgccactcctaccacctcctccaagcctacccaccattggagcagagactagacgtagaaaagcacgacggaaagagctagagatggagcagcagaatgaggcttcagaggagaataatgaccagcaatcacaagaagttccagaaaaagtaactgtatccagtgatcatgaggtaatcgcccctggtcaaatgatgatgctatggcatcaatcctccaaaggaagaggaacccgggttgccgcatggtttaagtaggggagctatagtaacacttagtgccctttatatcaatgtgggtttattgtgttcatacatttctttctgttttacaaagtcaaaaacatcctttgctggttttgcaccagagaataggggttagttatcatctgtgtttaccatgtggcctcacatgagttaacagtttaaagcactagagattgttatagagagttttaagctaccagaataaaacagattgattttttctcagagcttgagtacagctgaatattgcctctatcttaaaggaagtagacaatccagaagaaaaaccagaagaagagaaagaagaggttatagatgaccaggagaacctagctcatagcaggagggtgagtactgtctgacattactttgctccttctcattcctgctacctccatcatgtgaacctcttctgttctcttgactttgtatcatctcattgatttgacctgaaggttataatttgggctttttccgtaataaagattttattataatttttttatttatttttctctatacacacagtagttttgtagtgattattatctagtgatggtttgaagaggttgtttttttttttttttttttttttactaacaatctggtttccgctgggcgcggtggctcacgcctgtaatcccagcactttgggagggcgaggtgggcggatcacgaggtcaggagatcgagaccatcctcgctaacacggtgaaaccttgtctctactaaaaatacaaaaaattagccgggcgcggtggcgggtgcctgtagtcccagctactcgggaggctaaggcaggagaatggcatgaacctgggaggcagagcttgcagtgagtggagatagcgccactgcactccggcctgggcaaaagagcgagactccatctcaaaaaaaaaaaaaaaaaaaaaatctggtttccgaaaaactggctggtcagaatcaaaatgtattatagttggtttgctctgaattaggaattttctaggtttttgtgagttctgaagtttttttaaacccttttagtcatatgaactaaaattttctacttttatgctgaaaccaatcctgtgtgtttatgaccctgatttgatgacttttttttttttctttttgagaccgactcttgctctgtcaccaggctggagtgcagtggcgcaatctcaactcaccacaatctctgcctcccgggttcaagcaattccccttccttagcctcccaagtagctggcattacaagcatgcgccaccatgcctgggtaattttttgtattttagtagagacggagtttcaccatgttggccacgacggtctcaatctcccgacctcatgatcttcccacctcagcctcccaaagtactgggattacaggcgtgagccactgcacccatcctgtttttctttcatattaaagtttcaaaataactgaccctttttgaaaagtttatgtttgaccttgcctttatttacaactattccccacatttaaaatgaaatattttatttttaatcttctgttttccaagttatatgtgtcatcttactggtagttaaatgaatttctgtaaatttccattaaaaatacttttataaaagctatccactcgtcctcatttgaagcttccttctacaccagtactatctctttctagaccagggaagatagaaaggtagaagccatcatgcatgcttttgaaaacttagagaaaagaaagaagcggcgggatcagcccttggaacagagcaactctgatgtagagattactacaaccacctcagagactcctgttggtgaagagacaaaaactgaagcccctgaatctgaagttagcaactctgtttcaaatgttaccatcccaagcaccccacagagtgttggtgtgaatacccggaggtcttcccaagcaggggtaagagttgaaaagacttcagcacttagacatcctcacctttgctaatgtcaatacctaacttttggaatttttaaaatcagtgttttcagctttgctccatatcacaataaataaggccattaactgtttaactggaaccatttcattggcctattttataaatgcttattagaaataacgcaaacatttgtcgctagcctctttagctcatttaagtgtatacatttttgtatttaaaaattagattttaaattagtgtttctaatccttatatttttcatcagtagacattctgaatgcttaaagtgaataggaaattagactgtttgctgataaaacatttctggtaagcatctgaccctactattgctacaggatattgctgcagaaaaactagtccccaagccacctccagcaaagccttctaggccccggccgaagagtcgaatttctcggtacaggaccagttcagcccaaagactaaagcgtcagaagcaggccaatgcacagcaggcagaattgtcacaagctgccttggaagagggaggaagtaacagtttagtaactcctactgaagctggaagtctagacagttcaggagaaaacaggccattaacagggtctgacccaactgtggtgtcaattactggatcccatgtcaaccgtgctgcatctaaataccccaaaaccaaaaaggtaagtcacaaatgcatcctttataagtccagtctggcaagggctgtcttagtgaaatgagaggacctataatccctagaagaaactaatctcaatattactagattgaaagttctaaaatgctttgacacaaaaggctggagtcatcctgctacctgtttccttatttttagtcagcttaaatcactgatagctgaaattattcctctcttagtgggcgtggagagggtgaaggaagatatccttgtgttctagttgctcaattcattcttactgcagctgctgcatctcctcctgtcctagtttctagatgacgtttgtctttatgaactacactgctacctcttgatttataaactaatgatctcttttttaccttagtatctagttacagaatggttgaatgacaaagcagagaagcaagagtgccctgttgagtgccctttacgtatcacaacggatccaactgtactggcaacgaccctaaacatgttaccaggtcttatccattccccgttaatttgcaccacccccaaacactacattcgctttggctcaccctttatccctgagagacgtcgaaggccccttctgcctgatggcacattcagctcctgtaagaaggtatgtctgtgtttttgtgtgtgtgttgtgtttatgtgtgtgtgctttatttttttaagcctaagattcctatcatcatgacataaataaaatgttctctagatagccactctgcccatgtgagtttataatgagttagttgttcagccataaatactgattcatcaagagtctgtgagactgtggtggaatgaatgtactgcatttttagtgctcagatttgtgactggtcactgatgtctcttctgagaacccttgaggttcctgagtgagagcacacagcagtggatgactgggtagagacggatatgttttgtgtgtgctcttgtgatatgggttaacatgtccatttatgattattgtgtgagattaggccctgggtcctctagaacactgttgcataaatgaaaaaaattaaattgttttgaatcaattcaaccgttattatccactatcatcacttgaaggaaattagaggaaaaatcctattgtaattggcataattcctgttccttgatcaaatgacaagtcggactgtttattccaagagaatacagaatctaccctaaaagactctctttccctctctgtttctgcctctttctcctctttccagttacttactgtttttggatctagtggcagtagcgtttggtggtgtttttggaatgctctttcttaattcccagaagccctgcatattttccaaaggtgtctcttaggaatagatcactccctcagatctatgatgtcgttttccatgtttctagaagtataggacaccctttcatttggtcttcctttgaggtagagtctgttccctggaacacccttttctcttatcctcagatctggattcaggctgccttcctcagtgtctgccattgccctcctccactggcatcacgtacatgaggatgctgcatgtagattatttgatgtgatgaagtctccaactccaggcaggtcttccctgactcctccaaacttaaaagcttttctctttccccaaagaacagaagttatttctccgggggaggggggcatgaaagatgagccaaagtggtgtgggatatggaggggaggagggcaataggaatctgcaaaaaggaaggacactactgctgaatgagcagcacattgcagaaagtcttttcctaattgcacatcttacctaaacattggaatcactcattggtttgttcggggaaacgctcgtagaattcctaaagagaaatttgaccatttctaaggatgttaactgttgaagcatcttatcaagccaggtcgtacaatctcctattttggtcctttaaggagtgtaggcaattatttattacagataagtaatgaagtctgagctgcaaataatatgaactaggctcttgaattgaaattccttcttgataattctaatgctgggttgcagtctttctgtttccatcttttccaactagcagagacttaacgaaaaccaaaaacgtgtctaggactgtaacttcagatctggtagaaaatgcatttctttaagcttttttaacttggttctgcttttatacttgtatctatagcacatccttaaatttctacgggcaacagatagaaattccatttaacacaagtccctgttatattctccaagtgtatctgactatccttaatctcatttatacaggctctactcaagcacttttatctatgtgtcatggttagtctttaggaagagtttaggctgcatacacaggattatcataacaagactatttaaataggatctttaaaaactgtttaagtcattgctttattgtgtgctgttcacatatcaagattctattttttaaaatacagctttttatgaggcaaaataaaatgaaatggaatgttttagctagaatagaatttggctttatagcagtgaagaagagttcttcttctaatattggtcttcttctaatatctcctaatattggttagaaaggacttacctaatgcagaacctaagaacattttcattattcaacaaaattgtaataaaattctgaaaatccctcagagtataagttaatcagatagataagaaaaccctccatgggattatttagaacaatgtatatttctaataggctcactgtttcatatctcactaaagaggtaagggcctggccttgtaagttaaaaacttaccagtataggacaaattaaagttgtatctgtatagttgtactcagattcttatgctatttatttttatttttatcattattattctgcaacttctgaaaagaagaggagttcaggtatttgacagaacattttatgatatccctagagtttctaaattgaatcatagtttttaagaagcattttgcattttttagttcctcagttggtattttaaaaacatttataagtggccaacaaggctctcagtagtgtttcaccttgttctctctaaactcctcttctaaacacaatgtgtatagggcatttggtctccagacttcttagaaaaaccagtctgactgataatgaaacagtgtgctttgcattgataattaatatttcattttatacactggagcattatctgtaaatctccaaacatagcattgaaatttagttgaaccgggactcggtgaaaatctgctcagtgttcagtactgtactataagctttcttcacatacattatctcacttaccatgcatgaaattgggatcattgtcctaaatttatatatccagaagctttgtctcagaaatgtttggtaacttgtccaaagtgaagcagctaataagtgacacagccagatttcttctggtgggggatagtaggggttcacagggtctcactgttgtccaggctggagtgcagtggcatcatcacaggctcactgcagccttgacctcctgggctcaaatggtcctcctacctcaacctctcgtgtagctgggaccacaggcacaccaccacgcctggctaatattcatattttttgtagcgacagggttttgctgtgtttcctaggctgatctcaaactcctgagtgcaaggagtctgcccaccttggcctcacattctgctgggattacagatacgagctactgagcccagcctcacagccaagtgtcaagccagggcttctggactccaaaacctgtattgcttccttgctctttcgccataatagcgagacctttaaaatatttatccatctttgagcctcccagaaaactcctttgcaatatattttaatagaggttcagagaagggagaaatgttcttttgattttaacaacttgctgagtaggtgcatctaaaattaacttattatccatgaggttaattgtatcttgttagatacaaacaaatgtccatgttccttttttatatgagtcctgaaatattgtaaaattatacaacagaacctggaggagtaggtttgattgtatttgctgtgtttcacctcatagctaaccatggtagcatctttcttctagaatactcctgttctgattttatgttccctttttgtagtcatcagatccagaatgtaaattattttacaagtacatctactagaccctggaaatattaaaaaattactcagataggaaagcttagtgaccccaaatgagtgttttctgctttgaaaagaaaaacttaaaggtggccataacaaaagatttttcactcctgagcctaatttttccatttataaaatgagtgctttggacaagatgacttctaagttctcttctaagctttaaggctatatgtatggttctgacaattcatctttacatcattattctgtatctaagatagttcattcttcggattttttattttgtttttgtgtttgcttttcagagacctggttgtatcctaaaatgtttacgtgattcaaattaccattgagagctcttttttatatccttgttcactcttccttccaagtgtttacaggtttacagtttcagttttgctttcatttggccagccacaatgacatttgtatgatgtaagatttttttttttttttttttttttttggtaaaatttttgtggattgtttcctaggtttctaagagggaaaatctatgagaattgctctctggtgaagagagtatttacttacctgtaatacatgttctctaaaggtataaattataataattcacctttgctcttcctattgggggagggtcttactcagaaattgatgtttatcaaaattcgatctgtcttatgtcagggcaggagagccacagagtggtgagcaacctacaactgtatatcttaagagaacacaattacaggtaagaaattttctgtcttccacaggatacataatcttattatcctaatctttgcaggtttactatctggcctaaatttatttcttgtcagtttattattctaatctttactaccaaaaacttgtgactgataggtcttctttttgactttttcccttttttttgatttctactgaagctcatttcgtgatttgcattactcatgcataatttaaccaaactacttgttggaggggggagtcccataggttatttcatttgaaataaaccttttggaaacgcttttggtacctgtagtgaagagctattaatcctcatccaaaatcttccaatgaatcttttttattacctcttcacacgtctctagcacggggcagacaacttttaagagatctttatcttccttctaggcgcttattttatatattagttttattctatacgatcacagtctctcctaaataaatgttaagatttcttcctcagtcttgccattttacaccatcccaaatggtatgaaaagttgaatagcagtcattttttattggtttttgtcttttgatgggatctcattatatgtaatccagatttcctcaagtttttcagttaaaaggaattgataggacaatgttccaatatgctgagacacaagacaataaaatgcttgactgtgtaactgaattagtgtgttgaattgtatcactcaccagttgatgtacatttaaaacaggtgcactaaatagttttagataattattgataattctctggttcttttcaattatagcgctggataaaacaagccttagaagaagggatgactcaaacatcatctgtaccccaagagactagaactcagcacctataccaaagcaatgagaatagtagctcttctagtatctgcaaagacaatgcaggtacgtatctaaaacctttctgattatatgaccaatgattgtttcaggtctgcataaaaaatttaagtatgagtatttctgatacaaaaagaaatggcgtgttttctaaatagttactttacatctgtctttacagaggaagagagagatctcaagtcagggatcagttttcccaggacgacaaagaaggactagacagtgtacagataacagcagaaatggttataaaaaaggttagatacatttaaagtagtaagtttaggaaatttatattcatatttataagatggggcaagggcaagaaagtggtggaacactaatattcaggaaagaattaaaattctgagtgattaagttgggtgggacatggttgagggagcaggggatgaatgaaataagtgaaaaattattatcaattgattgttttcaaaggggcttgtataattagcatacaatttttaaaagaacagccgggcgctgtggctcgcacctgtaatcccagcactttgggaagccaaggtgggtggatcacctgaggtcaggagttcgagaccaacgtggccaacatggtgaaaccctgtctctaccaaaaatgcaaaaattagctgggtgtggtggcaggtgcctgtaatccctccctaaacaggaggctgaggcagtggagaatcacttgaacccgggaggtggaggttacagtgagccaagatcacgccactgcactccagcctgggcgacaagaatgaaactccgtctcaaaaaaaaaaaaaaaaaaaaaaaaaaaacaaattttttaagacagctttaaatctaaagtctttgtgcatttttaaactagatgtcaatgaaaaatcatctgttccattggttttgacagtgacttgcaaaggatgtaattgaaagcacttgtgatatcttaatgtattttgtgacaatctttttaccagtttctcctgcaaatatcagcttaattgaaaagttctttgtgattttcataacttttctctaaatcagttttttaaatattagacaatcaaaataccaaagtaaattagatgctaaagcaacctttcaggttgcaacaaacagaatatttcacattttcataaaaaacccacttcattgttcctgtttaccaacttgctgaataaatgtaatgaacttgaatttaattagataaatttttagtagcagatattgcaactaaaatcagaacttttcttaaagttcttacttcatttggattttacttctttttagattttatttcagaaaacgtgaattgcctttttttctttttttcttttttttttttttttttttttgaaatggagaatcaagcgattctccctgcctcagcctcccgagtaactgggattacaggcgcccgccacctcacccggcaaatttttatattttgagtagagacggggtttcaccatgttggccaggctagtctcgaactcctgacctcaggagatccgcccacctcggcttcccaaagtgctgggattacaggcatgagccaccatgcctggctgtgaattgccattttttaaattatggatttagtttattcttttgtctctagattagattatacctcataagttaccacctatatacctcaggataataaaattccagttatctgaaagataaattatactgtttatttaaaatattttcttctagtattcaccaaaaattagggatatttagtcaaatatgaatagtataaagaaatcttggtaccagatttccatttgtattatttcttttttaacagcttttaaggtgttagtaagaatataacttagctgaaatagactatcatgtttgtgtatctatctggtgtgtgtgttaatgcatgtgtatagttaaggttgggaacaggagattgcatagcagttcacatcctgactagcaaaggattataggaaaagtgtctttgttatcacatgccctggttggaaggaaattaggattcctagtcaccagccttttttgttattgttgagcttctgccctagtctaacagtgagaaacactcacaggacacaccttgcccttaaaaagcaatgtaggaaaatatttgattttaaaaatcaagcagcagtcaaatgcgcaagttatattgctacaaaattagcataaattctgaggaattacttttatttgttggctctcttttgtttttttcaagaataccaaagagacattaagaaaggggaaaggatttctataatagaaaaaatcaaacagacctttacttgaaaaccagctgtcccctttactaactatatgatgttactagaagtctctgaggctaggcgttggtggctcacacctgtaatcccagcactttgggaggccaaggtgggcggatcatctgaggtcaggagttcaagaccagcctggccaacatggtgaaaccctgtctctactaaaaatacaaaaattagctgggcctggtcacgtacctgtaatcccagctatttgggaggctgaggcaggagaattgcttgaacctggaggtggaggttgcagtgagacgagattgcgccactccactccagcctgggtgacggagggagattctgtctttaaaacttaaaaaaaaaaaaaaaaacaagtctctgagcctcatttgtaaaatgggaatagcaatacctgctttatagagctaacattagaatgaataatgtatataaagttctcaatatagtatcaggcccataagagtaattattatacggtcattattctacacagaatactctttcttgtagagtatttgtggattaataaatacattaaagattctggctgggtgtgatggctcacgcctgtaatcccagcactttgggaggctgaggcgggcagatcacgaggtgaaaagattgagaccatcctggccaacatggtgaaatcccatctctactaaaaatacaaaaaaaattagctgggcatggtggcatgcacctgtagtcccagctactcaggaggctgaggcaggaggattgcttgaacctgggaggcagaagttgcagtgagccaaggtcacgccactgcactccagcctggcaatagagtgagactccgtctcaaaaagaaagaaagaaagaaagagagggagggaagaaagaaaagagaaaagaaaagaagaaagaaatacactaaatattttaagttcctaaaagctgaaactttatagaaataaaagttattatcaaagtagggcaggggcatgatgttcattatttgtaaatgatgtgggtctattcttagaagagcctaagtaatcagctgaaaaacttagaattaataataagagtttaggccaggcgtggtggctcacgcctgtaatcccagcactttgggaggccgagatgggtggatcacaaggtcaggagatcgagaccatccttgctaacacagtgaaaccccatctctactaaaaatacaaaaaattagctgtgcgtggtggtgggcacttgtagtcccgctactcggggggctgaggcaggaaaatagcatgaacccaggaggcggaggttgcagtgagctgagatcgcgccactgcactcctgcctgggcaatagagtgagactctgtctcaaaaaatatatatatatactaataataataataagagtttattaatatcactggatagaaggataaatatataaaaagtgtaaatatattttaaaaaatcatttatataccaagaaagtaaatgaataccaattttttttgttcccaaacttaacaaaactaagaaactgcctaggaataaccttagttgggtatatggagtaaactgttactgagaaatatttttaaagtctgaggaaatggaaatttctttttctttttttttttttcatgaatcatacgtgagcctttgataaatttcatgttcattatggaaagaatatatatatgtgtatatatatatttctttctctttctctctgtctttatatagttcccatgaaactgccttgtttttggaatttgattaaatgattctgaagtctacctttaaaaaaataagaaaaaaattgaaaaaataataatgaagtactttctcttgaggtgtaagacgagcttctagtatgaagctaatagttaaatttagtataatattgatgcaagaatggatgtatatatggaacaaaatagtcagaataggcctaaatataaatgtaaaagttggtaaattgtcatggaatttttagttaggagattgaaaaagaattagaatctagctggacacggtggcacgtgcctgtaactctcaactacttgggaggctgaggtaggaggatcactcaagcccaggagtcaagttcaacctgcgcaacacagcaagaccttgtcttcaaaagaactactaggtcctttgccaaagaaaattctaggcacattcaaatatatatatttttttaattcaaacttgggcctggcatggtgactctcacctgcaatttccagctctttgggatgccaaggcagaaggatcacttgaggccaggaatttgagaccagcctgggcagcagagagagacccacatctctacaaaaaataaaaattagccaggcatgatggtgggttgcctgtagccttaaggaggctgaagtaggaggatgacttgagcccaagaatttgaggctgcagtgagctgtgataatgccactgcgttccagcctgaatgacagcaagacatctgtctctaaaaataataaaataaataattcaaactgtattaaccatgtttttgtgtctatactgcctctgtattaatagaggattagtacattggggaaaggatttgcagtaaaactgccggggagtaatatccctgctagcaatctgataaaatttatcatgtgcattaaaaatattcataatccttaacctagtagtcgttcatttgttctgcttggtatctttcctacagaaatagacaaagaaaccaaaatttatatataaggttggtgcaaaagtaattgcgtttttggaccattaattttaaatcactgtaactagactcagacacatctttattaatcaaaataggaaccactgcaatcaacacatttttgccactgagaaataagtttgtttattcctgtagcctaaaaatctatgcttcaggattcgacaaactcttggaaaatattttctgcatcctgctggttgtggaagcaccttccctgtaaaaagttgtcagatgcttgaagtggtacctggttggcgagaggtcaggtgaacatggcgggtgagacgaaactctgtagtcaaatttgttcagcagcttcagaagttgaatgaattgtttattagaataattaattcttagttattaacaattgcaaaaactataggttaaaaataatctgaattccaaccccaggaatggtagaatttgtaattttatctgcttgtgcacatacttgtaatggagtatcatatactatttattgaaaatcttatttttgattcattttatcaaattaactccctctacccccaaaaacagcgtagtaccacttttgaattagatttgtgatcttacctagcaccttgaatttgtaagaatattaaaagaatagccaggtgtggtggctcacgcctgtaatcccagcactttgggaggccgaggcaggcggatcacgaggtcaggagatccagaccatcctggctaacacggcgaaaccccgtctctactaaaaatacaacaacaacaacaaaaaaaaaaaccgggcatagtggcaggcgcctgtaatcccagctactcgccactgcactccagcctgggcgacagcgagactccatcaaaaaaaaaaaaaaaaaagaatattaaaagaagaatatacgatgactaaggttccttctaggaatgtaaggatgagttaatatttgaaaatttaataatcgtcatttgttagcaggtcaaatgggggaggagaagtcataacacagtgacttttatcaatttaatgataaaataacatactatgatcttttaatatctagctgaaaaattgccagttgtcatgcatcatgaaaactagttaaacatcaaaataggctatcaaattatcccactattaccattattatttaatatagtctaagtaattgttagccaaagtaattacaccaaccccctcccccccacaaaaaaaatcaacataagagatataagtactggtaaagagggttaatgtgttatcatgtacaaatactattatctacctagagagttaattgaaaaactggtagagattaatagggtaactggataaaaaataagtatgtaaactttttaaatgttaataacatttagataacaaagggagagatacgttttattcatagtagtaaaaaaaaaaaactaaagaactctggagagtaaacttaattagacatgtggtatatatagatgaagagggacataatatgtgaataacaaagattatgccatgttcctgggtaagaatgcttctcaaattactcctgaatttcatctaacaccaatcaaaatcctaacttttttttttttttttaatagtatgagcatggtcattgaatgacttctatagttcattgctagaatagctaaaatattttggagaactagaacagaataactggaatttccctaacaattttaataaaaagtatgctggtgttgattcagtattggacaataagtggaaagaataacattcggaaataaacattcagaagataagcccagtatatgtaagaatctaataagataaatatatttcaaattaatagggaaattatagttattctacatttacagaagattttggaagaaggtgctggctatttgttatggggaaaggatggattaattgctaccccatatttaagtatgttcttttttccttttttgtaatggcagtttgtcagtgtgaaataaaatgttcttttttaattaaaatctaaattaaaaattaaacatggagacaaaaggaaaataggctggcatttttacagtgtcagggtgggttagcaaagacatgatatcagaagcagaaaataaagtgatccgtttgactaaatagaaacaaaacatatagcagagacttgtaaataaaattgaaggcaatcagtaaactgggaaaatacatttgtaattttattgacaaggggtcaacattcttactatttaaagagcccttacagatgaagaaaaagaccccaacacctcagtagaatgcaggctgaagaacatgagccagcagttctcacaggactaaatataaactacacatatatagatattcttttgatttaataatcctacatgtagccatttgttctaatagcaaaaaatgaaaaaaaagttggttaaattttgataatactaatgttgtgcagtcattaaacctgaactgtagatttctattcattgtcataaaatgttgaccatgtatttctgagtgaaaatagttactgagtagtttaggtaaggcaagagtcagtgaagcaatgtctcgataaaaatttaccaggatattagcatgcgtttatttgtggatatgattttcaggttgtgtatgtgctgtataaccttggtaattttttgagtaaaggtgaaaaataataataataaaagatggatagatttgaccacataaaatttggaaactatatatgcaggaaaaagagaaaaagtaggcaaatgacttggctttctttggcctgtaaacttcttaagggcagacatcaggtctcttgttgaatacagtatcataataagtactcagtaaata

SEQ ID NO: 345 - DNA, 32765 bp, Homo sapiens
  source 1..32765: mol_type = genomic DNA
agagatgtgtgtggatgcccgtactttcggtaatgatgctcggttcatcagaagatcatgtacaccaaatgcagaggtaagatatctgtagcaacttccctttgactggaaccatcaaatgacaagcttactgaagaagcagtgtgaaaacttcactcagataaaggtctgtagataatagtcgtgatatttcatcgtgggaggtgaaaaacaaaagtaatggtgcttttatacgacaaaatgggcgcaaggaaagagttttctttagagaaggcagaaatagaaaagagcaagttagcatttgctaaggagaaaaagctagactggataagaaaatcaagtgtagttatattaaagagattgccatacggtggaagtagatgttgttaggcctaactaagctatttggttgcagtttttttagattttagtgagtaatgttttatgagaggatctagacatttctagaattcattactcagagcaaccacatcaaataaagcaagaaaatccacagagctttacttactggctaaggaattttaattctctggtggagctggaaacagctataagatgtgaaagcggctgggcgcagtggctcatgcctgtaatcccagcacttcggaaggctgaggtgggcagataacaaggtcaggagttcgagaccagcctggccaacatggtgaaaccccgtctctactaaaaaaaaatagaaaacttagccaggcattgtggcgtgtgcctgtattcccaggtactcaggaggctgagacaggagaattgcttgaacccgggaggcagaggttgccgtgagccgagatcacgccactccactccagcctgagcgacagagcaagactgtatctcaaaaaaaagatgtgaaagtagagattttaccctgatttctaacatctcaaggtttctccacatatttaagaaagtattataaattttcaagccagtgcagtataatagtttcagatgaaatgaaggggttaaataacagattaccataactccttaaataaataatagattaccataactccaaatggagagaaagtatggtttttttctctcttacggaaagttcatggtctttatgaaaaatccaaccagaagccttttcacacaggtgcgacacatgattgcagatgggatgattcacctgtgcatctatgctgtgtctgccatcaccaaggatgctgaggtcaccatagcatttgattatgagtatagtaactggtaagacctcagaaacctttcctaacaggaatatccatgtcttacatattaagctattcactctatttaaagtctgctcttgtttcttgccttttcctttgtttacttaatcttttcatgactaatgaattttctgcctagaaattgtaaaggaaaagacaggcaagattttttttagagatacggataccttgtatgatactgctcacaaatttcctgacagaagtgttttcgcttatgcctttttagcaagaatagcaaaatggatatatatgtatgtatgagacactcctggaaattacaatagcatcctgttgttatgcacagagtacttatgtcagggaccatatagaatgagaatttaggccaggcgcagtggctcacaggcctgtaatctcaacactttggaaggctgaggcgggcggatcacgaggtcaggagatcgagaccatcctggccaatgatgaaaccctgtctctactaaaaacacaaaaattagctgggcgtggcggcacacgcctgtagtcccagccacttgagaggctgaggcaggagaatcactcgaacctgagaggctgaggctgcagtaagccaagatcacgccactgcactccagcctggcaacagagggagactctgtcttaaaaaaaaagagagagaatttaatatgttacctctacttttaatttgtcaattatacccttataaagctaggggtgagatttaaagatccaccctgtccacagaaaccatgttatctagctgtatatgacagtgcagaaaaccataaagggcaattcatagatgaatatgtgggattttttaaagtatatgctttttgttctttggtcatttggggcaaaatagaggttatgtggtaaagtgatgtttggcccaggtataaggaaaaaagatgttctgcttaattcatcaaggaaaataaaaaaggttttaagaaggttataaaaggttttaagaagtagggaattagtaggtaaaagtgaggacatggtaatcgtgggcacaagatgagtatggccacatcagactttatcattgataaactgcctgctaaatagccaataaaccactggggggattgaatttagggagggctttcttttttttttcccactgaccatggagtagaattggggttacacaaagaaagacagaatattgaaagtgttacgtcaggcgcggtgactgacgcctgtaatcccagcactttgggaggctaaggctggaggatcacttgagcccaggagttcaagaccagcctagacaacatggcaaaaccccgtctctgccgaaaataaaaaaattagctgggcgtgtagtcccagctactcaggaggctgaggtaggaggatcacttgagcccaggaaacagagattaccgagagctgtgatgcaccactgcactccagcctagatgacagagcgagattccgtctccaataaaaagaaaaacaaaagtatttataggactctctaatgtctctgtttaacttattcagagacaatatcagaggaagttactgtactgatattttaagagggtgaatggataatgtaactgaatttcaagggtactgagacaggcattttggttgtttctttggagcagtaattataaagtggactgtgcctgtcacaagggaaaccggaattgtcctatacaaaaaaggaatcctaatgctacagaactgccactcctaccacctcctccaagcctacccaccattggagcagagactagacgtagaaaagcacgacggaaagagctagagatggagcagcagaatgaggcttcagaggagaataatgaccagcaatcacaagaagttccagaaaaagtaactgtatccagtgatcatgaggtaatcgcccctggtcaaatgatgatgctatggcatcaatcctccaaaggaagaggaacccgggttgccgcatggtttaagtaggggagctatagtaacacttagtgccctttatatcaatgtgggtttattgtgttcatacatttctttctgttttacaaagtcaaaaacatcctttgctggttttgcaccagagaataggggttagttatcatctgtgtttaccatgtggcctcacatgagttaacagtttaaagcactagagattgttatagagagttttaagctaccagaataaaacagattgattttttctcagagcttgagtacagctgaatattgcctctatcttaaaggaagtagacaatccagaagaaaaaccagaagaagagaaagaagaggttatagatgaccaggagaacctagctcatagcaggagggtgagtactgtctgacattactttgctccttctcattcctgctacctccatcatgtgaacctcttctgttctcttgactttgtatcatctcattgatttgacctgaaggttataatttgggctttttccgtaataaagattttattataatttttttatttatttttctctatacacacagtagttttgtagtgattattatctagtgatggtttgaagaggttgtttttttttttttttttttttttactaacaatctggtttccgctgggcgcggtggctcacgcctgtaatcccagcactttgggagggcgaggtgggcggatcacgaggtcaggagatcgagaccatcctcgctaacacggtgaaaccttgtctctactaaaaatacaaaaaattagccgggcgcggtggcgggtgcctgtagtcccagctactcgggaggctaaggcaggagaatggcatgaacctgggaggcagagcttgcagtgagtggagatagcgccactgcactccggcctgggcaaaagagcgagactccatctcaaaaaaaaaaaaaaaaaaaaaatctggtttccgaaaaactggctggtcagaatcaaaatgtattatagttggtttgctctgaattaggaattttctaggtttttgtgagttctgaagtttttttaaacccttttagtcatatgaactaaaattttctacttttatgctgaaaccaatcctgtgtgtttatgaccctgatttgatgacttttttttttttctttttgagaccgactcttgctctgtcaccaggctggagtgcagtggcgcaatctcaactcaccacaatctctgcctcccgggttcaagcaattccccttccttagcctcccaagtagctggcattacaagcatgcgccaccatgcctgggtaattttttgtattttagtagagacggagtttcaccatgttggccacgacggtctcaatctcccgacctcatgatcttcccacctcagcctcccaaagtactgggattacaggcgtgagccactgcacccatcctgtttttctttcatattaaagtttcaaaataactgaccctttttgaaaagtttatgtttgaccttgcctttatttacaactattccccacatttaaaatgaaatattttatttttaatcttctgttttccaagttatatgtgtcatcttactggtagttaaatgaatttctgtaaatttccattaaaaatacttttataaaagctatccactcgtcctcatttgaagcttccttctacaccagtactatctctttctagaccagggaagatagaaaggtagaagccatcatgcatgcttttgaaaacttagagaaaagaaagaagcggcgggatcagcccttggaacagagcaactctgatgtagagattactacaaccacctcagagactcctgttggtgaagagacaaaaactgaagcccctgaatctgaagttagcaactctgtttcaaatgttaccatcccaagcaccccacagagtgttggtgtgaatacccggaggtcttcccaagcaggggtaagagttgaaaagacttcagcacttagacatcctcacctttgctaatgtcaatacctaacttttggaatttttaaaatcagtgttttcagctttgctccatatcacaataaataaggccattaactgtttaactggaaccatttcattggcctattttataaatgcttattagaaataacgcaaacatttgtcgctagcctctttagctcatttaagtgtatacatttttgtatttaaaaattagattttaaattagtgtttctaatccttatatttttcatcagtagacattctgaatgcttaaagtgaataggaaattagactgtttgctgataaaacatttctggtaagcatctgaccctactattgctacaggatattgctgcagaaaaactagtccccaagccacctccagcaaagccttctaggccccggccgaagagtcgaatttctcggtacaggaccagttcagcccaaagactaaagcgtcagaagcaggccaatgcacagcaggcagaattgtcacaagctgccttggaagagggaggaagtaacagtttagtaactcctactgaagctggaagtctagacagttcaggagaaaacaggccattaacagggtctgacccaactgtggtgtcaattactggatcccatgtcaaccgtgctgcatctaaataccccaaaaccaaaaaggtaagtcacaaatgcatcctttataagtccagtctggcaagggctgtcttagtgaaatgagaggacctataatccctagaagaaactaatctcaatattactagattgaaagttctaaaatgctttgacacaaaaggctggagtcatcctgctacctgtttccttatttttagtcagcttaaatcactgatagctgaaattattcctctcttagtgggcgtggagagggtgaaggaagatatccttgtgttctagttgctcaattcattcttactgcagctgctgcatctcctcctgtcctagtttctagatgacgtttgtctttatgaactacactgctacctcttgatttataaactaatgatctcttttttaccttagtatctagttacagaatggttgaatgacaaagcagagaagcaagagtgccctgttgagtgccctttacgtatcacaacggatccaactgtactggcaacgaccctaaacatgttaccaggtcttatccattccccgttaatttgcaccacccccaaacactacattcgctttggctcaccctttatccctgagagacgtcgaaggccccttctgcctgatggcacattcagctcctgtaagaaggtatgtctgtgtttttgtgtgtgtgttgtgtttatgtgtgtgtgctttatttttttaagcctaagattcctatcatcatgacataaataaaatgttctctagatagccactctgcccatgtgagtttataatgagttagttgttcagccataaatactgattcatcaagagtctgtgagactgtggtggaatgaatgtactgcatttttagtgctcagatttgtgactggtcactgatgtctcttctgagaacccttgaggttcctgagtgagagcacacagcagtggatgactgggtagagacggatatgttttgtgtgtgctcttgtgatatgggttaacatgtccatttatgattattgtgtgagattaggccctgggtcctctagaacactgttgcataaatgaaaaaaattaaattgttttgaatcaattcaaccgttattatccactatcatcacttgaaggaaattagaggaaaaatcctattgtaattggcataattcctgttccttgatcaaatgacaagtcggactgtttattccaagagaatacagaatctaccctaaaagactctctttccctctctgtttctgcctctttctcctctttccagttacttactgtttttggatctagtggcagtagcgtttggtggtgtttttggaatgctctttcttaattcccagaagccctgcatattttccaaaggtgtctcttaggaatagatcactccctcagatctatgatgtcgttttccatgtttctagaagtataggacaccctttcatttggtcttcctttgaggtagagtctgttccctggaacacccttttctcttatcctcagatctggattcaggctgccttcctcagtgtctgccattgccctcctccactggcatcacgtacatgaggatgctgcatgtagattatttgatgtgatgaagtctccaactccaggcaggtcttccctgactcctccaaacttaaaagcttttctctttccccaaagaacagaagttatttctccgggggaggggggcatgaaagatgagccaaagtggtgtgggatatggaggggaggagggcaataggaatctgcaaaaaggaaggacactactgctgaatgagcagcacattgcagaaagtcttttcctaattgcacatcttacctaaacattggaatcactcattggtttgttcggggaaacgctcgtagaattcctaaagagaaatttgaccatttctaaggatgttaactgttgaagcatcttatcaagccaggtcgtacaatctcctattttggtcctttaaggagtgtaggcaattatttattacagataagtaatgaagtctgagctgcaaataatatgaactaggctcttgaattgaaattccttcttgataattctaatgctgggttgcagtctttctgtttccatcttttccaactagcagagacttaacgaaaaccaaaaacgtgtctaggactgtaacttcagatctggtagaaaatgcatttctttaagcttttttaacttggttctgcttttatacttgtatctatagcacatccttaaatttctacgggcaacagatagaaattccatttaacacaagtccctgttatattctccaagtgtatctgactatccttaatctcatttatacaggctctactcaagcacttttatctatgtgtcatggttagtctttaggaagagtttaggctgcatacacaggattatcataacaagactatttaaataggatctttaaaaactgtttaagtcattgctttattgtgtgctgttcacatatcaagattctattttttaaaatacagctttttatgaggcaaaataaaatgaaatggaatgttttagctagaatagaatttggctttatagcagtgaagaagagttcttcttctaatattggtcttcttctaatatctcctaatattggttagaaaggacttacctaatgcagaacctaagaacattttcattattcaacaaaattgtaataaaattctgaaaatccctcagagtataagttaatcagatagataagaaaaccctccatgggattatttagaacaatgtatatttctaataggctcactgtttcatatctcactaaagaggtaagggcctggccttgtaagttaaaaacttaccagtataggacaaattaaagttgtatctgtatagttgtactcagattcttatgctatttatttttatttttatcattattattctgcaacttctgaaaagaagaggagttcaggtatttgacagaacattttatgatatccctagagtttctaaattgaatcatagtttttaagaagcattttgcattttttagttcctcagttggtattttaaaaacatttataagtggccaacaaggctctcagtagtgtttcaccttgttctctctaaactcctcttctaaacacaatgtgtatagggcatttggtctccagacttcttagaaaaaccagtctgactgataatgaaacagtgtgctttgcattgataattaatatttcattttatacactggagcattatctgtaaatctccaaacatagcattgaaatttagttgaaccgggactcggtgaaaatctgctcagtgttcagtactgtactataagctttcttcacatacattatctcacttaccatgcatgaaattgggatcattgtcctaaatttatatatccagaagctttgtctcagaaatgtttggtaacttgtccaaagtgaagcagctaataagtgacacagccagatttcttctggtgggggatagtaggggttcacagggtctcactgttgtccaggctggagtgcagtggcatcatcacaggctcactgcagccttgacctcctgggctcaaatggtcctcctacctcaacctctcgtgtagctgggaccacaggcacaccaccacgcctggctaatattcatattttttgtagcgacagggttttgctgtgtttcctaggctgatctcaaactcctgagtgcaaggagtctgcccaccttggcctcacattctgctgggattacagatacgagctactgagcccagcctcacagccaagtgtcaagccagggcttctggactccaaaacctgtattgcttccttgctctttcgccataatagcgagacctttaaaatatttatccatctttgagcctcccagaaaactcctttgcaatatattttaatagaggttcagagaagggagaaatgttcttttgattttaacaacttgctgagtaggtgcatctaaaattaacttattatccatgaggttaattgtatcttgttagatacaaacaaatgtccatgttccttttttatatgagtcctgaaatattgtaaaattatacaacagaacctggaggagtaggtttgattgtatttgctgtgtttcacctcatagctaaccatggtagcatctttcttctagaatactcctgttctgattttatgttccctttttgtagtcatcagatccagaatgtaaattattttacaagtacatctactagaccctggaaatattaaaaaattactcagataggaaagcttagtgaccccaaatgagtgttttctgctttgaaaagaaaaacttaaaggtggccataacaaaagatttttcactcctgagcctaatttttccatttataaaatgagtgctttggacaagatgacttctaagttctcttctaagctttaaggctatatgtatggttctgacaattcatctttacatcattattctgtatctaagatagttcattcttcggattttttattttgtttttgtgtttgcttttcagagacctggttgtatcctaaaatgtttacgtgattcaaattaccattgagagctcttttttatatccttgttcactcttccttccaagtgtttacaggtttacagtttcagttttgctttcatttggccagccacaatgacatttgtatgatgtaagatttttttttttttttttttttttttggtaaaatttttgtggattgtttcctaggtttctaagagggaaaatctatgagaattgctctctggtgaagagagtatttacttacctgtaatacatgttctctaaaggtataaattataataattcacctttgctcttcctattgggggagggtcttactcagaaattgatgtttatcaaaattcgatctgtcttatgtcagggcaggagagccacagagtggtgagcaacctacaactgtatatcttaagagaacacaattacaggtaagaaattttctgtcttccacaggatacataatcttattatcctaatctttgcaggtttactatctggcctaaatttatttcttgtcagtttattattctaatctttactaccaaaaacttgtgactgataggtcttctttttgactttttcccttttttttgatttctactgaagctcatttcgtgatttgcattactcatgcataatttaaccaaactacttgttggaggggggagtcccataggttatttcatttgaaataaaccttttggaaacgcttttggtacctgtagtgaagagctattaatcctcatccaaaatcttccaatgaatcttttttattacctcttcacacgtctctagcacggggcagacaacttttaagagatctttatcttccttctaggcgcttattttatatattagttttattctatacgatcacagtctctcctaaataaatgttaagatttcttcctcagtcttgccattttacaccatcccaaatggtatgaaaagttgaatagcagtcattttttattggtttttgtcttttgatgggatctcattatatgtaatccagatttcctcaagtttttcagttaaaaggaattgataggacaatgttccaatatgctgagacacaagacaataaaatgcttgactgtgtaactgaattagtgtgttgaattgtatcactcaccagttgatgtacatttaaaacaggtgcactaaatagttttagataattattgataattctctggttcttttcaattatagcgctggataaaacaagccttagaagaagggatgactcaaacatcatctgtaccccaagagactagaactcagcacctataccaaagcaatgagaatagtagctcttctagtatctgcaaagacaatgcaggtacgtatctaaaacctttctgattatatgaccaatgattgtttcaggtctgcataaaaaatttaagtatgagtatttctgatacaaaaagaaatggcgtgttttctaaatagttactttacatctgtctttacagaggaagagagagatctcaagtcagggatcagttttcccaggacgacaaagaaggactagacagtgtacagataacagcagaaatggttataaaaaaggttagatacatttaaagtagtaagtttaggaaatttatattcatatttataagatggggcaagggcaagaaagtggtggaacactaatattcaggaaagaattaaaattctgagtgattaagttgggtgggacatggttgagggagcaggggatgaatgaaataagtgaaaaattattatcaattgattgttttcaaaggggcttgtataattagcatacaatttttaaaagaacagccgggcgctgtggctcgcacctgtaatcccagcactttgggaagccaaggtgggtggatcacctgaggtcaggagttcgagaccaacgtggccaacatggtgaaaccctgtctctaccaaaaatgcaaaaattagctgggtgtggtggcaggtgcctgtaatccctccctaaacaggaggctgaggcagtggagaatcacttgaacccgggaggtggaggttacagtgagccaagatcacgccactgcactccagcctgggcgacaagaatgaaactccgtctcaaaaaaaaaaaaaaaaaaaaaaaaaaaacaaattttttaagacagctttaaatctaaagtctttgtgcatttttaaactagatgtcaatgaaaaatcatctgttccattggttttgacagtgacttgcaaaggatgtaattgaaagcacttgtgatatcttaatgtattttgtgacaatctttttaccagtttctcctgcaaatatcagcttaattgaaaagttctttgtgattttcataacttttctctaaatcagttttttaaatattagacaatcaaaataccaaagtaaattagatgctaaagcaacctttcaggttgcaacaaacagaatatttcacattttcataaaaaacccacttcattgttcctgtttaccaacttgctgaataaatgtaatgaacttgaatttaattagataaatttttagtagcagatattgcaactaaaatcagaacttttcttaaagttcttacttcatttggattttacttctttttagattttatttcagaaaacgtgaattgcctttttttctttttttcttttttttttttttttttttttgaaatggagaatcaagcgattctccctgcctcagcctcccgagtaactgggattacaggcgcccgccacctcacccggcaaatttttatattttgagtagagacggggtttcaccatgttggccaggctagtctcgaactcctgacctcaggagatccgcccacctcggcttcccaaagtgctgggattacaggcatgagccaccatgcctggctgtgaattgccattttttaaattatggatttagtttattcttttgtctctagattagattatacctcataagttaccacctatatacctcaggataataaaattccagttatctgaaagataaattatactgtttatttaaaatattttcttctagtattcaccaaaaattagggatatttagtcaaatatgaatagtataaagaaatcttggtaccagatttccatttgtattatttcttttttaacagcttttaaggtgttagtaagaatataacttagctgaaatagactatcatgtttgtgtatctatctggtgtgtgtgttaatgcatgtgtatagttaaggttgggaacaggagattgcatagcagttcacatcctgactagcaaaggattataggaaaagtgtctttgttatcacatgccctggttggaaggaaattaggattcctagtcaccagccttttttgttattgttgagcttctgccctagtctaacagtgagaaacactcacaggacacaccttgcccttaaaaagcaatgtaggaaaatatttgattttaaaaatcaagcagcagtcaaatgcgcaagttatattgctacaaaattagcataaattctgaggaattacttttatttgttggctctcttttgtttttttcaagaataccaaagagacattaagaaaggggaaaggatttctataatagaaaaaatcaaacagacctttacttgaaaaccagctgtcccctttactaactatatgatgttactagaagtctctgaggctaggcgttggtggctcacacctgtaatcccagcactttgggaggccaaggtgggcggatcatctgaggtcaggagttcaagaccagcctggccaacatggtgaaaccctgtctctactaaaaatacaaaaattagctgggcctggtcacgtacctgtaatcccagctatttgggaggctgaggcaggagaattgcttgaacctggaggtggaggttgcagtgagacgagattgcgccactccactccagcctgggtgacggagggagattctgtctttaaaacttaaaaaaaaaaaaaaaaacaagtctctgagcctcatttgtaaaatgggaatagcaatacctgctttatagagctaacattagaatgaataatgtatataaagttctcaatatagtatcaggcccataagagtaattattatacggtcattattctacacagaatactctttcttgtagagtatttgtggattaataaatacattaaagattctggctgggtgtgatggctcacgcctgtaatcccagcactttgggaggctgaggcgggcagatcacgaggtgaaaagattgagaccatcctggccaacatggtgaaatcccatctctactaaaaatacaaaaaaaattagctgggcatggtggcatgcacctgtagtcccagctactcaggaggctgaggcaggaggattgcttgaacctgggaggcagaagttgcagtgagccaaggtcacgccactgcactccagcctggcaatagagtgagactccgtctcaaaaagaaagaaagaaagaaagagagggagggaagaaagaaaagagaaaagaaaagaagaaagaaatacactaaatattttaagttcctaaaagctgaaactttatagaaataaaagttattatcaaagtagggcaggggcatgatgttcattatttgtaaatgatgtgggtctattcttagaagagcctaagtaatcagctgaaaaacttagaattaataataagagtttaggccaggcgtggtggctcacgcctgtaatcccagcactttgggaggccgagatgggtggatcacaaggtcaggagatcgagaccatccttgctaacacagtgaaaccccatctctactaaaaatacaaaaaattagctgtgcgtggtggtgggcacttgtagtcccgctactcggggggctgaggcaggaaaatagcatgaacccaggaggcggaggttgcagtgagctgagatcgcgccactgcactcctgcctgggcaatagagtgagactctgtctcaaaaaatatatatatatactaataataataataagagtttattaatatcactggatagaaggataaatatataaaaagtgtaaatatattttaaaaaatcatttatataccaagaaagtaaatgaataccaattttttttgttcccaaacttaacaaaactaagaaactgcctaggaataaccttagttgggtatatggagtaaactgttactgagaaatatttttaaagtctgaggaaatggaaatttctttttctttttttttttttcatgaatcatacgtgagcctttgataaatttcatgttcattatggaaagaatatatatatgtgtatatatatatttctttctctttctctctgtctttatatagttcccatgaaactgccttgtttttggaatttgattaaatgattctgaagtctacctttaaaaaaataagaaaaaaattgaaaaaataataatgaagtactttctcttgaggtgtaagacgagcttctagtatgaagctaatagttaaatttagtataatattgatgcaagaatggatgtatatatggaacaaaatagtcagaataggcctaaatataaatgtaaaagttggtaaattgtcatggaatttttagttaggagattgaaaaagaattagaatctagctggacacggtggcacgtgcctgtaactctcaactacttgggaggctgaggtaggaggatcactcaagcccaggagtcaagttcaacctgcgcaacacagcaagaccttgtcttcaaaagaactactaggtcctttgccaaagaaaattctaggcacattcaaatatatatatttttttaattcaaacttgggcctggcatggtgactctcacctgcaatttccagctctttgggatgccaaggcagaaggatcacttgaggccaggaatttgagaccagcctgggcagcagagagagacccacatctctacaaaaaataaaaattagccaggcatgatggtgggttgcctgtagccttaaggaggctgaagtaggaggatgacttgagcccaagaatttgaggctgcagtgagctgtgataatgccactgcgttccagcctgaatgacagcaagacatctgtctctaaaaataataaaataaataattcaaactgtattaaccatgtttttgtgtctatactgcctctgtattaatagaggattagtacattggggaaaggatttgcagtaaaactgccggggagtaatatccctgctagcaatctgataaaatttatcatgtgcattaaaaatattcataatccttaacctagtagtcgttcatttgttctgcttggtatctttcctacagaaatagacaaagaaaccaaaatttatatataaggttggtgcaaaagtaattgcgtttttggaccattaattttaaatcactgtaactagactcagacacatctttattaatcaaaataggaaccactgcaatcaacacatttttgccactgagaaataagtttgtttattcctgtagcctaaaaatctatgcttcaggattcgacaaactcttggaaaatattttctgcatcctgctggttgtggaagcaccttccctgtaaaaagttgtcagatgcttgaagtggtacctggttggcgagaggtcaggtgaacatggcgggtgagacgaaactctgtagtcaaatttgttcagcagcttcagaagttgaatgaattgtttattagaataattaattcttagttattaacaattgcaaaaactataggttaaaaataatctgaattccaaccccaggaatggtagaatttgtaattttatctgcttgtgcacatacttgtaatggagtatcatatactatttattgaaaatcttatttttgattcattttatcaaattaactccctctacccccaaaaacagcgtagtaccacttttgaattagatttgtgatcttacctagcaccttgaatttgtaagaatattaaaagaatagccaggtgtggtggctcacgcctgtaatcccagcactttgggaggccgaggcaggcggatcacgaggtcaggagatccagaccatcctggctaacacggcgaaaccccgtctctactaaaaatacaacaacaacaacaaaaaaaaaaaccgggcatagtggcaggcgcctgtaatcccagctactcgccactgcactccagcctgggcgacagcgagactccatcaaaaaaaaaaaaaaaaaagaatattaaaagaagaatatacgatgactaaggttccttctaggaatgtaaggatgagttaatatttgaaaatttaataatcgtcatttgttagcaggtcaaatgggggaggagaagtcataacacagtgacttttatcaatttaatgataaaataacatactatgatcttttaatatctagctgaaaaattgccagttgtcatgcatcatgaaaactagttaaacatcaaaataggctatcaaattatcccactattaccattattatttaatatagtctaagtaattgttagccaaagtaattacaccaaccccctcccccccacaaaaaaaatcaacataagagatataagtactggtaaagagggttaatgtgttatcatgtacaaatactattatctacctagagagttaattgaaaaactggtagagattaatagggtaactggataaaaaataagtatgtaaactttttaaatgttaataacatttagataacaaagggagagatacgttttattcatagtagtaaaaaaaaaaaactaaagaactctggagagtaaacttaattagacatgtggtatatatagatgaagagggacataatatgtgaataacaaagattatgccatgttcctgggtaagaatgcttctcaaattactcctgaatttcatctaacaccaatcaaaatcctaacttttttttttttttttaatagtatgagcatggtcattgaatgacttctatagttcattgctagaatagctaaaatattttggagaactagaacagaataactggaatttccctaacaattttaataaaaagtatgctggtgttgattcagtattggacaataagtggaaagaataacattcggaaataaacattcagaagataagcccagtatatgtaagaatctaataagataaatatatttcaaattaatagggaaattatagttattctacatttacagaagattttggaagaaggtgctggctatttgttatggggaaaggatggattaattgctaccccatatttaagtatgttcttttttccttttttgtaatggcagtttgtcagtgtgaaataaaatgttcttttttaattaaaatctaaattaaaaattaaacatggagacaaaaggaaaataggctggcatttttacagtgtcagggtgggttagcaaagacatgatatcagaagcagaaaataaagtgatccgtttgactaaatagaaacaaaacatatagcagagacttgtaaataaaattgaaggcaatcagtaaactgggaaaatacatttgtaattttattgacaaggggtcaacattcttactatttaaagagcccttacagatgaagaaaaagaccccaacacctcagtagaatgcaggctgaagaacatgagccagcagttctcacaggactaaatataaactacacatatatagatattcttttgatttaataatcctacatgtagccatttgttctaatagcaaaaaatgaaaaaaaagttggttaaattttgataatactaatgttgtgcagtcattaaacctgaactgtagatttctattcattgtcataaaatgttgaccatgtatttctgagtgaaaatagttactgagtagtttaggtaaggcaagagtcagtgaagcaatgtctcgataaaaatttaccaggatattagcatgcgtttatttgtggatatgattttcaggttgtgtatgtgctgtataaccttggtaattttttgagtaaaggtgaaaaataataataataaaagatggatagatttgaccacataaaatttggaaactatatatgcaggaaaaagagaaaaagtaggcaaatgacttggctttctttggcctgtaaacttcttaagggcagacatcaggtctcttgttgaatacagtatcataataagtactcagtaaatatatgttgaatgaatgccttgtacattgatttgcacgtggcagatttcacctgtatcttataactcctttctacaactaacttcatcacttaacataattgactttgatagttatagtgttggacctagcagtacagagatctgtaagattccattgtttaagacccttgaaatattaaatatataaaagttattccgaatataagccatgaattacatgtttgtttctgttttatacctaggcactttttaaaaggaggaaagaaaatttagtatctggaacaaaaggaagatgtgaatatacttccaatctaggaatattaaaaatcctgagatatcagaaaggaaaaatatgcatcttcaataattttttgcatttattcttccctcttcatctaaacatctcctaccctagtttagtgcctcataattctttgctaactactgtgttaactccagatggtttcccagttactagtctcatactgaccattgcttccagataatcttcctggcccaaaaattttccttgaaggcctggaataaatgtcactccttccatccaccaagccttggggatatactttaacctattgattaagaatatagatagatggagccaggcgcggtggctcacgcctgtaatcccagcactttgggaggccgaggcgggtggatcacgaggtcaagagatcaagaccatcctggccaacatggtgaaaccccgtctctactaaaaatacaaaaaattagccgggtgtggtagcgagcacctgtagtcccagctactcgggaggctgaggcaggagaatggtgtgaacctgggaggcggaccttgcagtgagccgagatcgtgccgctgcactccagcctaggtgacagagcaagagtccgtctcaaaaaaaaaaaaaaagaaaaaaagaatatagatagatggggccaggcgtggtggctcatggctgtaatcccaacactttgggaggctcaggtgggtggatcacttgaggtcaggaattcaaggccaacatggtgaaaccctgtctctactaaaaatacaaaaattaagaatgtagatatatgggagcaagaatacctgttttgtctctctccacacatcaagtttctcacctttaatatggggatgataataatagtgcttgatttatagagttgttaaaattagatatttcacaataaagcacatggcatagtctgtggtatataatcatcatttagaaaatacagcttttttttttttttaactaacacatagcaatatgatcacctttcttgatcatgctaatactaatgtgttcactttttttgttgtgtcgttttgttttgttttgagacagtctcctccctctgtcacccaggctagagtacagtggtgcagtctcaactcgctgcaacctctgcctcctgggttcaagtgattcttgtgcctccacctcctgagtaactggaactgcaggcatgcaccaccactcctgcttaatcttttttgtgtatttagtagagacagggttttgccatattggccaggctggtctcaaactcctggcttaagtgatctgcctgcctcagcctcccaaagtgctgggattataggcatgagccaccacacctggccctgtttctatttcttacaaattttaagcctcttgaaaatagaatgtatgatgaccatttttcccttcatacctagttcagtaatcagtaggtattaaatatatatacttttaactgtaaatgaataaaactgtatttttattctgagaatcaagtgagaaaggtgctttgacctaaatggtcactaaaatatttagtgtagtgacttgctttttaagtggatctaagaagtacagaaaataggattattctagtcaaaaagaatgtgaacctaattttttaatggttgggagaagtttttgtagaaatcatttcatgctttttaggtagaaaaggggctagacatggatcaaggaatcatataagaatagaaagagcttctgaaaagggacacacatatataagagatggtgaaaggaatttggatttagcatcccagtacctttagttggtgatatagcagtttagtagagggtaactgtaacacagtaacaaagacttttcagaaactcaatgtaaaagaaagaactgtagcagtggctcacgcctgtaatcccaacacttggggcgtctaaggcgggcagatcacctgaagtcaggagttgaagaccagcctggcaaacgtggtgaaatgccatctctactaaaaatacaaaaattagccaggtgtagtggtgcatgcctgtaatcccagctactcgggaggctgaggcaggtgaatcacttgaacccgggagacggaggttgcagtgagctaagtaaatgccattgcactccagccttagcgacagagcaaggctctgtctcataaataaataaatgaataaatgaaagaattttatattttgcactggtagaaattaaattagagatcagtcacatttgatttacctggagtttgggagatagaatgttttcagagttattttaagcatggtaattaaagagtttctttgggattttggttggattggaggagataacttaatgggatgaggcagaaaacagttaagagccattgtagattacagattaatggctttactgtagagccttaaattaatctgtggtttcaaactctcatccaagctttgtgtttcacagacttgttgagcccattaaagaaatggaagtctcgctatctgatggagcagaatgtcaccaagttacttcggcctctgtctccagtcacaccaccccctcccaattcaggctcaaagagtccccagctggccacacctggctcatctcacccaggagaagaggagtgtcgaaatggatacagcctcatgttttcaccagtcacatctcttactactgctagtcgctgcaacactcctctacagtttgaggtgatttgggtttggttgctgggagtgctggatatgaaaatcatcatttgtaccttctcatttcaaatataataccattccaaatgtttctttactatctttcttccccatctcagtaagagaatgggaaacctcagggtcattgtggcctgttacctggtagcctctcatcttggcagcccctatgcttcccaaaataggcatactgctaccacaaatcccattcatgtatcttttgcatgcagtccatcaatctccataagtttaggtagtaagcatgctagatctccatcgttatctttactgtatactttggtcaaaataggcctctagctgcctgtagtatctgttagtaacactagcctgagagcacagatgatattgattgattgtgtcttcgtttctaggcctttaaataagtgaagtgtctttcccaggttgtttggtattttcattgtggccttagcagagatttagaaaacattggggtatggcttatggcgaatgtgggttttttccactccaggttactttccctctttgttataatgtcttaggaatcagaagtagacaagaggctagcaacatgtattcatgagacaaatttattaccttcactgttggattaagttagaaatgtctgcctcagctgtttcaaaaagtaatcttgaatcactttagtgttcaggtttgggtgacagcaggtttcaatagaatccatgtatacttttttaaaacacttcatctattgcatgttactttgatttgtaattaaaatggacactgtctcttttttccttctcagaaaaatttgttctgaccactaaacacactctgctgctctgcccccttgtttgcacttctccagatgtgttttttgagaaaggtgaacattttaaccaatcttacgtttcctattcagcttttccaagtatgaggattcagaatacttagcttttatgagtaactaagaggcagctagcaacattgaaagcagaactgtattctttcttaccctagacctctacttttggagcagacctctttctgggtgagggaaaaaacctcctggttacatatcagttatctagggaaattactctttaccagattatttatgaaattctttcagccagataataaagcagctgattcaggcctttctaacttgactttgtctacttgcaattgactttgcagtttgcacctagagctttatagtaaggtatcatgagaggaattctccctggagggcataagattataggaatagagtgtcatactttatcaatacaggttttattataaatgtggaattatgaaaattagaaggaggccgggcgcagtggctcacacctataatcccatcactttgggaggctgaggcaggcggatcacgaggtcagtagatcaagaccatcctggctaacgtggtgaaaccccgtctctactaaaaatacaaaatattagccgggcgtggtagtgggcgcctgtagtcccagctactcgggaggctgaggcaggagaatggcgtgaacccgggaggcggagcttgcagtgagccgagatcgcgccattgcactccagcctgggcaacagagcaagactccgtctcaaaaaaaaaaaaaaaaaaaaaagaaaatcagaaggtaagtcactttgcaaaacaagcgggttcagtactcagtgtgttccttatcccttgtagcatttgggataactattaaacactgcaaatataaagtggttttggttttgttttgttttgttttttttaattggtgatcattttaataatacagtccatgcataatgttagaataccaggagggaaggaaaatattaaatagtaaaaggtccaaggcatggtttcacttgcaatttaaggaaattttacctttctcatcaataatagaacagatttcaccaccctgacccattctaatcaccattttaatggccatactctttgctgtattctagtacagagaggtggggagccttttttgtagcaaaggctgtgacacattgtgaaatatcaaaaaggtgtcacgtataaagaccagcttaggctgggcatggtggctcacacctgtaatcacagtgctttggaaggctgaggcaggaggattgcttgaggccaggggtttgagaccagcctgggtaacatcgtgagaccacatttctgcaaaaataaaatacaaaacttagccaggtgtagtggcatatacctgtagtcccagctacttgggaggctgaagcaggaagatcacttaagaccaggagtttaagactgcagtgagccattattgtgccactacatgccagcctgggcaacagtgagatcccatctctaaaaataatttaaagaccagcttaggccaggtacagtggcacacacctgtaatcccagctactcgggaggccaaggcaaaggaattgcttgagcctgggaggttgcagggagccaagactgcgccactgcattccacattccagcctgggcaacagagggagactctctctcaaaaaaaaaaaaaaaaaaaaaaaaacaaccttactagattagtttggggaaggatatttttgagaaggaaaaaagcattcaggaaaatggtgagaagtcttaagtgctaaggggaagaaggtaagaagataaacagtggaagagaacaagatcttcaggaggggaaagcatctagaaagaagagtggaagcaacattgggaggacaagcttagttagcctctcctttctaccagaataaccctcccctcctattcttgccctgagagccatactccacccgccatttcacacatacgtgcacctagatgtacaccacccactgtccatgccaagtaaaattcacagccaaaaccctgctttgctgaagcagcctcatttcccctacctcagcatgtgcctgccacctaggccacagttattcagagtctacattaggcaccctctccttacctcagccctagcacccctgagtcattgtcacactaccaccttcactctcttcacgtgttcccatttacatctttccattaagcactcactgctcagtctctgttatgggactgctgcctcacctgaaagtcccaaggtaaagtcctaccctctgtaggatacagggacctaagtatacacatacatgctttttctgctctgttgccaaaagtacaatggattttacaaaataacattaataggggtggctcaggtctaattagattatgccaagaaccaactctagcctgtgagctagggattccatcaatcacatttcctgtaactgtcattcaagaggaactggccatctccctaaccatgtcagcccccagcacactaatgtctccccctggatagcactgggagggcctgaggcatataagagaataaagaaatgtgacaagcagaagaggcattggatgaaggaacaaggtccatgtaaggaggaataaggggtagggtgcccctcaataacaaatactgtaggttgctaaactctcatctaaaatacaaagacgtataacactaaaatttcaccagtctaactctttccttgtatgtgcttgagatgtttacttacagcatgaaacattataaccaatttatccttaaatgctttcagagataccaggaagcattttaacaagtcattctgtccattgagatgagttctgcagttaaatatttcccctatgcattcttattcaacttccccgcccccgaaaaaagttatggctaacatctatgcttgcttttattttttgttttgttttgcttcttgacttcgagtagatgaataataacaagatgcttttccctcctctagaacatatcctcccctgagagttcccctgcgcataggcccgagtccctgtcacccgaggtagttatcacaccatctcaatcacacttggaggctgagagtgagtgttcatgaatgtgttcctgagtgtgtggggagggctggggatctgagtcagtggggtgatgggctggagggcggccactcagtcacagtaagttgaatgagtcttcctgtgtgactgtgactacacaggactgtcaatgtagatggaggaaaatgaaggtaggagcgtgtgtgtttgtgtgtgtgtgtgttgtgtgtgtgtttggtggggttggtttttgccgtttgggggagggggtggctggagttctattaaagaatagaatctagaagtcaagatgctgatatgtggtaggagccttgttaaagaaaggctaataaatcaggaaagttgagtcaaaagttgtaagagctgttttttgagttgggtggtgacttatgccttgttctagggttaatctaacagctctgtaaaccagatgttttgacctttggttgatagattgagcagcttcttcaggaagggaaagtcattctgtctttcagctttcctacattttctctgcagctccttactgggtgcacaaggaaaccaagtgagtccctggctttctgtcacaggccaccattctgcaatggttaggatatggttgctatacaagtgttatctctttaggatatcagtagagtggttttctcacaaaccctactgctgtggatatgtcaaactcagattttagtgctagagtttctattataagctttcagatttagtaacattaactctgaatctattaatacatgggaccttttttctcttgaagagaaagttagagtctctcagaaatagtcaactgaactttaaccctatccccttccaataaaaaattagggcataattcagtgacagtctactaagttctgaatcagtagtagttcacaggttaatatgaaactgaaaaaggttttattccactagtatattagagattttcttggtgttttgactctagcttgttaggaaagtaaagctctctctcctcagttgttaaagattctaagataacgtaatttgaagactgatatggtatggtatctggttttctggtaccattctttgtcggttagctgtagttgacctagtgttggaagtttggaggttatgataaccaaatagtaggtggggtttatttttggtacatttcagcatttcagaatctgcagtgatgagcattagtggtcttgtggtatgttgacgtacattagaggataaagaagaattgagtggccagaaagttgtatgagaaacacagcttctttaacagtgaaagtgagtgaagaactggttggttgatgtctttaatgccatcctcctttactgaaccagtaacttaagtacttgcctttccgtctaccttctccttcctccacctttttcccttccccccaccttccatcaatattaatttagaaattgataaccccggaagccagttatcttaagacaccagtctcatctttgttttgtgcatggggctaaggtaaattcctaattataccacttgtcccttagtgtagtacaaggtgactcagcaacctgatgaaaggctaagcaggcaaaatagtcacatttagccaattacctaattctaactttcccagtatttcccatccagaaagacttgaaagcaattttggaaaggccaggattctttagtactctggcccatgtacactgttgctacgtgggacttttacagaatataatggctttatctgctctacttccgtccctcttatctttccctgttcacctgtgtccctctcccctcctttctgccctttgactttttcctttctcccctaccccatgtctccgttgatttttattctttcagctttgtcaccgaaaagacctggatttggcaaaagtaggataccttgactccaacactaacagctgtgctgatagaccttccctactcaactcaggtcattctgacctggctcctcatccctccctcggacccacttctgagactggtttcccaagcagaagtggagatggacatcagaccctcgtgagaaactcagaccaggcatttcggacagagttcaacttgatgtatgcctactcccctttgaatgctatgcctcgagcagatggactgtatcgaggatctcctctagtgggggataggaagcctttacatttggatgggggatattgttcccctgcagaaggattttccagcagatatgaacatggcttaatgaaagacctctctcgtggatccttgtcacctggtggtgaaagggcctgtgaaggagtcccatctgccccccagaacccaccacagaggaaaaaagtaagtgtttcatgttatatcggcgaacttttcaagaatgttaaccaagtagtttagtagatattcataagtttctgctatgtgttccgcactactctcagacaagtgagacatagtctctgccaaatccagtgaaagacaggctgttttagtacaacttggtgaatgttgtaaatattcagcaaatgtaaatgcctgtatgtgccatatacttgctaggcaattgagaggttagaacagtgaaaaagaaattttacctattatttagtgtgtcccaagttcgaggcactgtattaagctctttaaatgtgttttatcctcacagtaagcctataagataggcaattttctattttgcacatgaggaaactaaggcaagttgagtaactttcccgtggtcacacagctagtaaatggaaggaccaggatactacccagtttgagagagaaggctggagtgagaggcagcaggttactgatttaactgaatctcaaacaataagtaggagtcagccaaccaacaattgagggtgaggtatgttacagtagagggagtagaacaggtaattaggtggcactccattggccaggcagcaggcatgcagtatggtgcaaacagttggatgttgttgtatcaggtggaaggccgggggagccaggaggaaagtgcagagagtgctgggctgggccaggccatagagagcttgctaatgggttgggactccacttccaagtaatgcctgatcaagaagtcacaaagccaaaaatatgcttttgtataagtggttctcaactaggggtgtttgagaatgagtaggagtgttttgaattgtcccagtgacttgcatttattgagcagggccagggatgctgaatgtcctgtataggggacagtcccatgtaatggccaaacatctgtagtatcctcattgaaatgaaacctagtggtttttttatattttcattataatgatattaccagaatttattaacttctttccaaaattatttctagaaaatgcatatgcaaaactgtctatatttttgttccatttggacagaaaaatgagaaccctaaggggatagaaggaggaggaaacattggcagataatttggattaagataataattgatttcgaagattgttgcgtgaacagcattgactaccagaaacaaacatgaaaacaatctttggatttctggttttataatatttactatgtgcaaaagtcatagaaattatgatattttatttcagaaacacttctgaaatttattgggcacatttaagcataaatttaagcatatgccaaattctgtgctggatgttaaagataaaaagccagataaacttggcctttgccttcctagaacttatagtttagtcagggagcaatcaaggcatggtaataggttctacggcctgtgtaagcaatgtgccagaacaacaaagagaaggtgtactaggcagggcacggattatggtgggcagggtgggatgggaggtctgctgtcaggaaagaatgagcaagcattagggagatgaaggggaagttagggagaagttaccaagttgttttctagagctagcttgctaaaattataaactggaaataataatttcctctctttttacattaattacatctatgtgtaagacagaaacagtaataaattcctatttatatcttgaaaatttgaacatatttaagtatcctggagcattgggtttttcttctgttttgttttgtttttccttctctctctccctctctctctccacctacctctccccacctccctctcctccatctccttctcctctccctgcttctttctctcaaacagctaactctaggggttcccaaggagtacagaacagccatcagtcacctgggaggctttttaaactatacaagcttccaattctcccttctctaggtacttccattgttgcaaataactgtgatagcatgcttctgttactgtgtaatggtaacctcacaagtttttctgaaggcagaaaaaaagatggtggtctaattggcaaacattctttagagacttgcctcctagtttattatcttcctcttaccaatttccagctgccttaaatatgtagctgtgctcagatctctttcatactccccaaaaaaagttatcagggttggtgtctgctttgtttgcgtggcttggctagtggtttactaaggtaccatctttccttctttccctgttgctggtgatccactaatgatatccagatagagtaccgttttttgtttgtttgttttttcctttctaggtatccctgctggagtaccgaaaacggaaacaagaagctaaggaaaattctgctggtgggggaggtgactctgcacagagcaaaagcaagtctgcaggagctgggcaaggcagcagtaactccgtttccgacactggtgcccatggtgtgcagggatcctcagcccgaactccatcttcccctcacaaaaaattctccccatctcattcctctatgtcccatttggaggcggtaagcccatcagattccagaggcacttcttcatctcactgcagacctcaagagaatatcagcagtaggtggtaagtttatatttgatgttttatagttaaattgggggtgggggggagtatatatctaagatcattcccagttttacctaaaatctatgggaacacttgatgggaacatctgagacagccagccaacagtaccatctgtcctgttcagctgatttaataatgtcagctgcaaccccccagctttgcagaattaagaattaccaacatgcctgtggagcagtgctttggatgacatgtagttatggatgcagatgagctctttcatttggtgggcactaacactgcctttcctatttctcatttcacatgaaaggtgagtcaagaatccagccaagttccacatgaattaacaacagatgtctctcttccacacagctagcatatacagagcaaaaagacattctgaaaggatttgtctggtttaggggagaccacaaatttaaaaatgaataatactggtggcaaatactgaggatcaaatgtgtgaaatagagaatgaagcacaggagttcagggatcttgaactgaaaaaaataagtctgggaaagaacagtcctggctcaaatgtttcatgttcattaatctatgaaacctttattaaaccagtactgtgtatcaggcacatgatttcctaaaggagaaattttaacattttaaatgggggttaagggaagttaacatctttaacccactttttccttgatttctttttctttaaaagtggttgttgttgatgtttctcttttgtgcctgacatagttggaggcagaggaaatacgttgttttaaattggttctgaagaaagtaatgtttaagaggatgttttaagaaaatacactgtgcactggttagggcttcatttgttttggttaagtcctgtggcttgaacttgcaccctgttgcctttacaggatggttcccacatcagtagaacgactccgagaaggagggagcatccccaaggtcctccgaagcagcgtgagggtggcccaaaagggagagccctctcccacatgggagagtaacatcacagagaaagactcaggtgagcccatggccttctgctgccaccacattcagggacacatgagccgagtcctgtacagttcatgcctagtgctgagttgaggtgagtcagtttctgatgcagttgggctccaccgcatgctaggttccagcccacttatgctcatttgggctaccacatttgtaagatctagcattgcttgctctctgtctgctcttttttccccaaggaatacctttctgtaactctcatctctccaaagtcctggaaatctacctcgatgaaggatgaagagaaagaagacgggaatcacatcaggcatttagaacatagcccataattaaccactcattttgcccttctggcatgc

SEQ ID NO: 346 - DNA, 32765 bp, Homo sapiens
  source 1..32765: mol_type = genomic DNA
aggaaacgccgtggcgccgcgttgggcctaactcgagtcctgccgcctcccgggagtgccgtgcgccgcagcccgggcccaggccccggcagcgcctgggacaaggtaagggtccgacagaaaagagaccgaacctcacgatcgggccccaggggagggaagggtcacctcctccgtctccccgcgctcgctctccttgggtcgtgggcctggccctccccaagctcttaggaggatgctgccacttctcacccccctcgccgccttgcacacaccgttgcaacaccccattttcccagggagagagatccccctctaatctaggcgacccaactccccctttcatgtttttcctgggtcaggacgcttcccctcccccaacgcctcttcaccccctttcctgggaactgcctactccacgtttacctttcccttgaggagaggcctcttgctgccctccgctcgaaatacacaggcatactttttttctctccccgatcccccactccctacccccgttctcgcggccttgtgacagacaactctgatcgctctgggggccgcgatctcccctccgtaatcttcctggacgccttccctctcgttttctggcttcccacctcagatggctgcttcccaaaggcattaccttcgccacccccaccacacgttctctggctccccgtggcgtgtgccacagcgtgtctgagatagcctcgttgaatgtgtagggttcgagcctggagttgagccagattgtgtcgttttacttgccttgggcgtggagaacgatcttgtgagaatatcttcaaaggcagaaaaatattccctttatgaattctctttccctctgcgtgtaagtcgggaatgtgaagaggagtgtaggaaagagccctggttcaagtaggtaaatcgcatgagagggaaagttaaactgttgggaaagccccttctatgctaattgattctatagagtccttgcttgtctcacttcttgggcgtcagtggtctttctcttggatatggatgctgcagtcagctctgctggtctgggtcaggggtgcgtgtatgacctgcattttctgctttctcatgttacttgtgcaatgtattcaccggtaactcatttctttcccagacctctgggttccactgggctttgtctatatttaagttcatttctccagtttccttcctgcacataggtactgaacgaatccccaagttctgtgctaattaccttcatcagttgactaaacaagtttttagatgacatatttgtgaccaaggtcatatttacatttctttgttggacagatgttacatagctatacttgtgattggggaggatccagctgagtggagtgtgctgagctttttaggagagtgtgtactccctatttgaaattattttttggttgttaattttatattattaatgtttttaggtcacagaaagttctaagtggtaattttagatgtgtgggatctgagctaggactaaagcagagaatacccacgtaatcagaggtttctgggctccatagaggacgtagggcttttttttttctattggatttcttccagttttctcaggatcattagttctcttctgtagccaaaaattctggcctgttatgggattagagtctttaaggtttactcagactgtcattatgtgtagaaaaatgaattatgccctttggtaggacatgacacaaggctctgtttctagctgcaaatttaaattagattgtagagtgcttgggaaattggctttcaaaagaccaaagcttaatcttcactcctaaactgctggcttaattaaaatggatatttagaatttggtaaatgttgatttttctaataaaaggccttggtttaaaagggtgaccttaggattgtttctttcttaaaagcataattccagcccttctggcatggagcactggtccaaaaaaaaaaaaaaaaagtgtgtgtaaggagtgggggtggggtaaagagaaggttgttcctttgggttggatcacaggggtgagtatacaaggcagcagcagctgctggctctggagctctggttgctacgtgagaagcttgagtagtgctggctgctgtctccagggaaggacagcagtgcagcgtccattaatgctgctggctgcagggagcagcacttaggcgatggctgcttcaggactaagaagaaaccttgcttttctgggaattttcactgctgagctggtttgctttttattggtggggagatgggaattagtaattcataatctcctacccatttatggatattggcatctggaaactggatcatggttaaagcctttctttttttgtttgtttgatttgatttttgttttttggcagatttttgttttttatctagacatttgtgcttggataggactaaaagttccattagagttttaatttttcaatcagtttaaaaacccaagtaataattttaagaatctttctgataaccacaataggaagaaaataacaggaattttttcctgcagctcacatatcatgccttcctccatctctttaatcatagaatcaattcttattattttgttatgtgtctccatcctttcgattagaccacatttaccttatagacgatttgctaaacattttactaagcttgaactcttaaactctaaaaaggtgccattttggagtggtttctaaataaatatttttaatttgtatattagtaataaacttctccagattagatattttctttggagtttgacttataagattgattcattatatacatgttggatatagccttctgacatcacaaatatatgtctttggccataatccatctgaaatgtaggacagaccagaagaaatatgcagaaatcgaataagtctagttcaggatactgagaagatggcctctgagccccttaggtgatctcccctcccccacaactcctgaacattaggatgatctctgattaagcaaaacagtctgagcgtggaaaaacttgaaggagaaccaccaccaccaattatatgcaatactggacatattcctgtgtgctgtttttcttccccaagactcgtgtatcctatacttttttctctcagaattttgatttgttcattttcgtgtaaatgtacttaaatctcacaaacatctataatttgtagtatcactctggcatttgtggcagagaaccaaaaagaatggaaatgagttttgtcattcacaaatgtggctcacattgttttcccagtaataaaagcagaccaatgaaacagaacctttaatggatactattttaggaggttccaattcttattactatcacatagataagatgcaatagcagataaatatgatttcatgtatactggctgtttgacatacttagggtttaagataaaaatgtttgtagttttttactctgtggcttaagttgctatataaaataattgcttttacactcgaatttcctgttgtttggaaccttttgtgctcttgatattatcattttttagaggatcatacaggcccttttcatagaaggatttacttaagttatacccttgaaaacttttttatatcttttgatactgttttgtgtccaggaactgactttctgaaattattctggcttttctggggagaatgactatttcatttttacctttgaatggggaaataataaagtgcaaagtacagatttgcagataattacttttgctttatcctctccatgttgaaataacttatgaaaaattaggccatagttaacagcagtcaatgactattggatacattttatcagaggggaactggatcatgaataaaataaaattttaaaaataatttttggctgaactctggtgattcatcagtttaatttgaagtcagaaggtctagcagtgaattttatttataaaaattgtatttcaagtgttgaaaactgaaacttcttgaccagtatattttgtttgaggcatcaaactttgcaaaatgtgcatcgtatatttagtgatataactggtagtcatttgtaatttaaagtattctttcaaaggcactctttagaaagtaatgtagtgtacccgtgatgggcagggattggtaccattccttactgccaaaaattccaaaatatgtggcaaaatgattgatttatcttgtgggtgggattctgggaagttcatgaaaggtggagagaatatagtttccttcacttgtctatatacattttgttaaataagtcttaggaaaactgttttattgtatctttaattatgaattgcgtaaaagatacccagtaactttggggggaggtgctgttagaaagcattacattggagagaattcccctaccctgggacaaaatgcattctgtctttaatacttagcgaagggaactatgggataaaataaacaatgaaggtaagctcagtctgctttatatgtgccctcactgagcaaggaatttgtaatcgcatcgtgcctcattcgtttataccatcatattgattttgtttgctgagtacctgagggaataccttacttaatgtaaggtcacattaagtatgtttgatatgaagacagggaaaggaattttctgcttcttggagtaatgtcttagtatttttaaaacacttaagtttttacatcaggccagttttgcctgatgctcatgtctgttgctttggttgggctgctgctttctcttctgtgttcttatgggttcgttgtggtataaggattcccacagctttcatggcagtatgaagtaatgagaagcattgccttagccatgttagttacatgtatacttttggcctatgttatgaatcacaaaaagcggtagctataggaatgtatacaaaatagatttctgtctggggaatcaagtttttgatttgtgctacctaatggaggggaaaatgctgaatttcttgctgctctgtttgagaaatagatggaagcatgggaggagccagagacctctgcagcaggatttggtctaagtagaaaaggaagatttttgtttcaaattgccagctgcttatgtcagactgactcccttattatgcctccagtaggcctgtcaatatggccaaacagctagataagtgcggggcaggacaaagggctctttgcacagcagggaggcaatgttggtgggggaggggcaggaggtaggaaaggcaagaggaggaggttcttttccctgggagattattcagtttggcatacaattaaagaaatcatttttagttcccactcaagcattgaatttttgccaaccacatactattaaccccaaatttgatacatttcagaatatcttgtagggatccattctcgccaaggaaaaataaaaaaataaataaagctctgtataggttaaaataaaataaatcccacactctgcaccctcctaggtgcaagtcacctcccgaggagacccgttctagagctgaattctcattaagaaatggaaaagaatactctatctgaataaaaacacattgtaatacaatgtgtttatttgggttgggattggacctgaacatgtagaataatttgtttccctttatgaaatagttgctcgtagttgtctacaattttatttcattaagataggtagcacattacagctttcatgtgttgggttgccatatgtaaaatgctaactgaagaaaggctactttttaatttcagcctcatccttagttcctggagaacctgatatttcctggagattactccctcccccaccttttagtttaggcaacctcttttgatacatttgtgttcagctcgcatacaagtgggatagttgcatccagtttattaagacttagtatgaatcatagagttggaaaagatctgttggttatctggtcctttaaaccaaaatcataatgaaatattttgaaatttgggtccctattgaagttttcattaaaatgttaaaggatcggtgttctgaacaacatttttagttacttttaaaataaatgttttgcgtcagttctttttttaaaaataaagaatttcatttataggcaaattagctggcaattatttgaattgtgataggatttctcttttatgaaggaatatatgacaaggtttttcaaaatgcttaatatattttaaaagactttaatttttagaaataattggtttgaacagttttccaagagcacatttgttgcttgggttgaggtaccacctatattgcaatgttactaaactagccttaaagttttcccttctgtctatactgcatgcaacaataaagggaactggaatgttaatttccatttatggattagcagaggagatgttttaaccgattaataaccaaaaaactgcctttcgtacacgtaatattaagcaagcctgaccaagttttgtgttatttctctctgttaaagaaaactggatgtgttactacttaacattatattgttatttaatggtcttggcagtaatgatataatatttcgaccaaaagaaattttgagtaattaattattattgtaattagttggaagtttctcatcagtaaaatagcaacagcattaacacaaaatctagtgagctatattttatattactacagaaatttagggtagtcatttctttctttataatttattcacatggattatttccataaatttgtgggactaaaatagaagccatctagtcaagcaccagtctccataccagacagttttctctgcatgtgctatgacccacattgccagtattaaacatcctttacaccctcccccttcccagataattagaaatctcttcagggtagcttccattgctcctattacctggatcttgctagaggctctaagaagttcctggtaaaagtgagacagtaagggaccacattttgattccaaaggttttgataactgttagggctccccaaacagctaatctcattttcaccaagacttagccagcagagggctggaatggaggtgaaacacaagcactgtacctcatcttgcctgtgcagctgctccaccttatttcctgctattattatctcacaacgcctcctcccatcaaaaagaaactaggacaaagggggaaaattggatgggctaatgtgatttttattatgctaggttgtgggcttgtttatatgtacttaaatacaaagctaatttgccccattcttaaaagtctttagtgatagagattttgtaacttctgtatcttctactttctttcttgataaaccatttcagattctcagccttacagaaagaaaggttttaagcatacttaattttcgttggccgttcacagtcattattaccaccagatgccactgtattattagcttgaagaaaggtgggctctcttctgtacataatatctgcaatttgttttggaaaatactaatttgtataaatctgatttatgactaaaataaggttaaaaattagacctctatgtatgtttaccctattaccttagtgggggtgaaattaattagctctttgaacataaatttttcatgtcttagagttcttttttcaagctgcataatttatgttcttcaagccatttttatcccataccacccccacaaagggggaaattttattttttatcatttttattgtctttcaatggtgagattttcgccaccccactcctgaaatgtgaagactcaaataaaactgagtaatctaataaggtatatgcgttgctgaatgtagtaagatgattgtttcatcattcttagatattatgatctagtttgaatctggtttccagtatcatgttagcatatttaatactgttgatatgttaattttaatacatgcccaggtggatctccttgctttctatttgtgccccttgtttgtcgttttgtatgaagggggtttttgttgttggattttcttccccatctctgtgtcctgttatgttctttggcttatgtttcaaaaattctgtttcctaccaccaacctctgtacatgccacaacacatacaatttgtactttcacagtttctgtgaagtaggatgatctgcagttaataatcaactgtttgggcattcttggtatccaaggaaggttttacttagaaggaagaacctggaaggacctgttggcaattagactacttctgcgtttattttacattttcccttattaacgtaggctgttgagagttgacttgttttataagagaaaccagattgacagagaagacccccaatcagatagagttattttaaaaataaatgtgtttattatggtaacatttggggtagaatctaaagggcatatttttaaaaaaacttttagttctaaagacaaaagagtttaacctaaaacagaacaaagagaagggcctttgaagcagtatgattgattatatgctgaatgtagcattagaatgttgtatgaaagcataaatttttattttctcaatttctatggtacaaactactatgcccatggaagtatgtgtttatgcccacagcctgaaatatattcggtggaatgccttaaaaaagaataaatctggccgggcgcggtggctcacgcctgtaatcccagctacttgggaggctgaggcaggagaatggcgtgaacccgggaggcggagcctgcagtgagccgagatcccgccactgcactccagcctgggcgacagagcgagactctgtctcaaaaaaaaaaaaaagaatagatctgaggaaaatgtaagagcaagtctaaaattttgaagtcctttttgaaatgctattttttcctagacaaatttagtgttatttgtggcaaatagaactttaatgtcgtaatttagtaatagaacaaaataagggtgggtttacatgtccctgcacattttaggatggagctaaaaattataatgtctgcataccaaattgttacacattttaatattggggcttttattgaaaaagtttacccaatatttagaaacctttaaaaacaaagtgacataaaatattcacagataaatcaggtagtcaccttattggtggcatattatgtaagtgtactaaagccagatatttagtgttaatccaaaaatatgaaaattatgctaacatcatatacagatctcagaagttgctgtagccagccaggcgtggcggctcacacttgtaatcccagcactttgtgaggccaaggcgggtggatcaccttaggtcaggtgtttgagaccagcctgaccaacatggtgaaatgccatttctactaaaaatacaaaaattacccgggcatggtggtgcgagcttgtaatcccagctacttgggaggctgaggcataagaattgcttgaccctgggaggcagaggttgcagtgagccaagatcgtgccactgcattccagcctgggagacagagcaagactgtgtctcaaataaataaaaaataaagaagttactgtagatgccactcttacttaaaccctaggccatgtgtggagtcccaggggaagacatgtatttttagagaaggaaggctctaggtaggtgtaaccttcctcttacagtttatcatgaacagttagtatgaaaaggaatggctggaagtttgcagtagtacaccgagcaacaagagaaataaacatatcccacttcatgaaatgactatgccagccaagggagatgaaaaacaattttttttatagtacacctcatttttttaaaaacactttaatactaggaatatgtttctgtggcaaatagttacccccaaaggattatgtcaaatatctcttgtgaaaattaattttaaaattaatcttttggctgggtgcggtggctcatgcctgtaaacccaacactttgggatgccaaggtgggcagatcacctgaggtctggagttcgagagcagcctgaccaacatggagaaaccccatctctactgaaaatagaaaattagctgggcgtggtggcgcatgcctataatcccagctactcgggaggctgaggcaggagaatcgctcgaacccaggtggcagaaattgcagtgagctgagattgcgccattgtattccagcctgggcaacaagagcaaaactatgtctcaaaaaaaaaaaattaatcttgtgtagatagtgaccacgttttactttccttgggacagtcctggtttatacctgctatcctagcgtaattagtaatagcacccgtttcactctcaaaaatgtctcaatttggatcataaattatacgcttaccataattgtagaggattgtgagacttttagtcgctacctagcaacctagtttttcttgatagagctcttcttattctggagtctcctgtgctgcgatttatctgttgacctctctgaacccccatttccaaatgagcagtttttcgaatgtcttttttcttttcccattaggtggtagtaagggaaggagtaggtatagatttgattaattttttaattttttattattaaaaactccaattactacaaaatagaaaaatactttggagtttattaaactgttagtttaaaaggttccatttgatcaggataaggtccataccttgattggtaagtttgagtctttatagattctgttttttccatgtaggattcttgttaaagaaattcattattttgtggagttcgtactctggattttgaaggttggataatcatttaacacattcctctattaaacaacctccccccacctgtatttcatgtaaattactgcttagatagattgtaagcatattttataatagtactgtgtatttccattaagagttacataatttctgcttgtctgtgtaatgttaagcagctgttgttattcattgcctagatcaaactttgtggtcttaaaaattgaagacctggaagagcttttgtttgtgtgaattatgtcaagatttaccatattagaaactaaaactgagaaaaattttaagttatttattaatattaaaataacagtaataaagcctgctaatacaagtaatgtgattttttaataaaaataacatttttaattttataagtgtcgtttgacatttttgcaaatctctttaatgtctgacttaatagaagacagctgctttctcataactccttctgcatttaatttcttgtgataagttgttttggttgaagactgaagaaaatctggccttgtacagataattggttggaaaatggaagacctcatataaccctctgacagaatctagaggacttcaggcattctcacaccaccctttttgagaatcactggcctatattcatgatttacttcatattagatgatattttcttacttcttcatttattgtccggaatactcacccttatttttatttggctatactaagatagtttatatacagaaggtaagataagcacttgggttttttacccccttatttactagttttcaaaataatgggttggtaacttagcaacatctaaagacgtgaatgaagtattattattgtgtactcatggttttaaacatgtttgatatgttacagtctctggcagttactatttttgacattcaggttgtcctacctttgtctgttggctactaaattcttttgattcattcttaatactttcctcacttgtttccttgcttcctactattactagatgttctaggataattttgtacattttttgccccaaacctggaatcagccatttctgcagaaacctcttcattcttttaatgaaaaatggtacttagaaaccacagtatggatggtaggagtgttcattgctcttggtttgggccttgtttctagatttttcaatgaacaaagtttaaaagtattttatttctttttaaaaatatcacttggtattttaaaagctgcatttcaaactcagtgctacatgatgtttacgtaaacctaatctttctccctttccccatgcccaaaatctcagttttcactaacaccaatgtaatttctctttgttttgtgccacaatacacacactacagttttagtgtgacagaacaatatgattactggaaagtggctttttgttttgttttctcatgtctttttgcccttagggtatatccctttagagatagagatagtcatgcctcacttgatgaggatattttctgagaaatgtgttgtcaggtgatttcgtcattgtgtgaacatctagaatgtactaacataaacctagatggtacacctaagctatatggtatagcccattgctcttaggctacaaatctgtgcagcatgtgaccactggatactatacgcagttgtaacacagtggtaagcatttgtgtatctgaaaatggaaaagataaagtaaacatacggtataaaagataaaaaatggtacacctttgtagggcagctccattacagtcttatgggatcattatcatatgtggtccatccttgactgaaatgtcgttatgtggcacatgaccatatatagtcagattacagtattttgaaatcccccttagaatagttctctatggttgtgccaccagtttgatacacagtgaggttaatttgttacattttactttcagatttttcagggattaggttttgttttatgattatgtaaaatacttaaatggttaataagtgaaatttacgaagctgggtataatcagaaaaattgagcttctatcctagtgtcttccagctggttctctccctgtccctgtatgttagactcaacagagtcatcatgaattttcagagtgatgttttgtcgatacttccccttttagcagaagaagcatttaggttagttcatttactaaaactatttccttctagatttttcactaactaatatttttacactgtagaagaggaatgtggaaatttctgttctttcttttttggaaccagaatttcttggcttaatacaagcagtttgagataagaaactttctccagtaaaaattctctttttttttttcttttttttcttttttttgagatggagtctcgctctgtttcgcaggctggagtgcagtggcatgatctcagctcactgcaacctaggcgtcccaggttgaagcaattctcctgtctcagcctcccaagtagctgggactacaggtgcctgccaccacgcccagctaatttttatatttttagtagagacagggtttcaccttgttgttcaggctggtcttgaactcctaacttcaggtgagccaccgcacctggccaaaattctctctcttgaaatgccagaccatgtttgtctctgggaatttcaggtacacttgggacactggtgctacttgaagtgtagagagctcatcagttaacatttcttgaatggtttgcccttagacctgaaatgtatgttatttagaaaggatgtcatatattttttaactttgtcatttaaaatccaagttatttgattttatgtgttttaaataaaatattaaaactttaaaagtcttgtacctgttaaatgttttatccttcctaattacagtatcttaaagttatcacatttcagcaatacgtcactttctaatgactaatatagtctttaaaaatactaaatcaagatataccaaaggtgaagaaatagtgattaagaatgtgaggattctagctgtggttttcttgctttggctttggccaagatgagtttaattctttggtctaataggaataatacttttctcctaaacattatgagcattatttgagttaatgcatgaaaagtggttaaaggaacagtggctggtgcaacataagcatccagtaaatgctgcctttattttggaagtggttattgttacgagtatttgatcagttctctaaactctgtctgaactttacttagaattagtaatgttcatatgctgtaaataacacctgattttcaatacttcattggttatatgaaaagaaccaactgttaacaaaggaataattggtatctagttaaaatttgaggcctctgacttcacaagtataccagtgcttactatataaatataatcacatttaaaaatttaataaagaaagttttaaggaagtaagtctccttttcaggatccagggtcctttacaaacactggatcctgaaattgtattatttgttgtggctttagggtattgtgtatgctgaccagagtcacaggtggtttttttgtttgtttaacactagaattttgagatacatttgtctttacatgccctcaaagtaagttatataacaccagattgttcattagttcaggtttgatttttttgttgttgttttttgtttttctttttaatactctggggttggagtgaggttgtagagtgctataaggaattcctattagaagatagtattttagatatgggcattctaggaaaggacaaaatggtacactaaagttatcttcccttttcccccaccaccaaaaaaataaggagcaaactacagtgcacagttttgggttttttttttttttttttttttttttttttaaagagacaaggtcctactctgtcgcccaggctagagtgcagtagcacaatcattgttcattgtaaccttgaaccactgggctcaagcagtcctcccacctcaacctccagtgtagctaggactacaggtatgtgctaccacacccagctaattttttaaaaaatatcttgtacaggtgggggtctcactgtgttgcccaggctggtcttgattgaactcctggcctcaagtggtctcatacctcagcctcccaaagctctgggtttacaggcataagccatcaggcccagcccacattttgttttttaaacaagtctttatcttttggagatacatgctgaaatatttatggatgaaatgaaatgttatctggggtttgctttagatagagaggagataatagatgaaacaatcaacttattagttggtcattgtcgatactagataatgaataaatggacttctttataccattttactttcatactttatttgaaacaaggtcttgctatgttgcccagctggccttgaactcctggcctcaagagattctcatgcctcagcctcccagagctttgggattacaggcatgaaccaccatgcccagcccataatagaaagttttaaattttaaaataaaagtattcatagacttggctatcatggatcctggtaaagtagactagtgaacataatcagatgtttcagtctttccctgttgatactgcttgccctctgagcccatttcctctcctgatcatcgcctgctatttccaatcaacagaaaaaatagagtagcctacatatataatgagtttatactaagagggaaattttaatattataaagaagtctatacagattctggagagcattcctgaagagaagattgaggaagcaaatggattaattaatgtaatagtgtgttcagtgtgcaataggtaacattttatgatatggttgaatttctgaaaaggtatcttataaatatcagaccatatttaaggagacttccacctctactgataaaatctgcccttctctctccccctgactttattgctgcccatctgtagttttgatcttttttctctaggattctttgcctagaattgccatgggccttctggatctggaacacggatgaaggaagaggatgaatgtttttcagatgttatcccttatgggagtaatttgtaaattctagcttcttcgggtggggggaggcggggtgtgtgtgtgtgtgtgtgtgtgtgtgtgtgtgtgtattatttatttatttttttaagttaattggcctcttccagcaaagagtatacagcagagacctagaagtttcattttttgtttgtttttgttttgttttgttttgtttttgagacggagtctggctctgtcacccaggctggagtgcaatggtgtgatctcttctcactgcaacctctgcctcccgggttcaagcaattttcctacctcagcctcccaagtagctgggactgcaggcgcgcgccaccacgcccagctaatttttgtatttttagtagagatggggtttcaccattttggccaggatggtttccaactcttgacctcgtgatctgccaccttggcctcccaaagtgctggaattacaggtgtgagccacggctcctggccaagacctagaagttttacgtcaaattttgtctctgcagttttctgaggaatgagtatatgtgctcaaataatagctaagtattaagtctgaaatattctagaaaaacagtcacaaagtagttatgcctaggatgtttttgaatattggtactagaacaaatggattcctactagatttcctttttactttcatattcagatgtaggaagagttggaattcaaaatgtgaaaagcagtcttgaatctcagtaaattcttaagaaattcttaattcattgaagagccattggtcgtgtgtgttttttggggagtgtgtgtgtgtgttgttgttgttaagaattcggggatgagtatgaggctatcattgcttctacaaggcaacttaatgatagtttgctgcttggcacaacaggtgaaagggcctttctagagcagggatcttggtttccctttttcccacctagtagtatcattccatgtatttaccaggatatacattgtttagtcctgtcttggctaaataggtaatggtccttaaggacataaaatggaaggatattgtgcagaagaattactagttctccgtagtgtatttttttactgtattctcctcatcaacagatggaaaatttttaaacttagaagaaaaaacaagtgtttttctccaaaagattgagaaccactgcttttaagttattaatggaggtcttcaatggatttgttaaaaatctggagcatggattttttttttttaatttttttgttattggttactgagtattggaaaaggaaatacagtattcaaaaacagtaatgttcaggatttggaactattttactcaggaaaaaataagtttataaatagacattttaatgaaaaggaaaatagcaaatttatggaaatctgagatagtctgtgttttgcttcactctgtttagtgctagaattctggactttgtttggggtcaaactctgatatgacaggaaaactaacagatgattaaaagagacagtaacataaatgggaaagtttaaatatggtatatggttttaattatattttgtataagaaagcagtttataccagttgtattcctaactaaaaagtactattttatcagtttcctgggactaatttattataagttaattaatgacatgagcattttggcccaaatacagttgaaatgttcattgaaactggatcaaagatgagcatatgtgtcaaggctttaaaatcatttttcatattaagatttccagagaaagtttttgtaatatataagttaaatatttttaatgctttagatgacaggaactgttgaaggtcctggatctcataacaagccactagctagctgatccaaagacatttggccccatgggcttctaggaagacaaatgtgcttaccatttcaaagattttattttgctcagtaacctactagacatatattagtgtttgtttgagttggtcgttgtcttccattgctgttattttattattattatttttttaattttagagacaggatctccttgtcacccaggctggagtgcagtggcacagtcatagctcactgcagtctcaactcttaattaggctcaagggatcgggatcctcccacctcagcctcttaaatagcttggactacaggtatgcaccaccactcctggctgtcttattgtgttgcccagggtggcctcaaaactcctggcctcaagtgattctcctaagtcagcctcccaaagcgctaggatacaggtgtgagccaccctgcccagccccattgctgttgaacttttttttttttttaaagacaggctctggttctgttgcccaggctggagtgcagcagcgcaatctcagttcactgcaagccacccaccgagctcaagccatcctcccacctcagcctcctgagtagctgggactataggtgtgcaccaccatgcctggctactttctttgtaatttttttgtggttcaaataggaatcttccacgtgcatccaaaatatttttggtttgtgacactcagtgttattattgactcatttttccattggaaggtgtgcctcagagtgggtgagcctttttgccctcagtcttctgtcagcactctaagactccaagtactctaagagattgctcactaaaaataagaacagctggccatctacctcaaatgtgagccgtcacttttgtgatataatcagtccttatctttagtacacagatttatggaatatcacactcactgtctgcctgctttggggtgtttctcctgtgtcattcatttttgtatattggcatatagcaaatataggaatgctgtgtcgcagctgtgggtcatgtatgtacttgcagttagctcttgctcccaagaatgcaagaaatttatcaacaaactcgtgtcataaaaatagtttacagtgatttttttcttaaaatatttcaatgattaagactttttttaataaccacaagtgtataattgtaaaacctaagcattactcagcaaatctagcaattgttgaattgcataagcttcttgttcattggaacttttgctaaagaattatgacctttgatttcttatcaccatgacctatcattatgataaacatgcccctcttatgtatccttatacccattataaggataaacaagggatagctccacccaccagatgtcatagacacaactggtattttggggattttgctgtagactaatcctggaaggaagagaggttatagataaaataagattggccatgaattgattgttgattaaagctgggtagggaacattgggttttctctggttttatatttatttgaagtttttcaccataaagttttttttttttaagataaaaaataaaagcatgaatagtgtaaacaaagttttgaaggagaaggaaacaggttagtagctaattaacaaaaatgttcttgttccattcaggcacaggagtttggactagcccaataagcattaaggaaaccattatttgtagatttcagataatgcaatgatagtaaccaaagttatgctctagaagggataacatcatggaagaatatagagtagattggagggttcacaccccagaggtagtgagaccagttcactgctattatataatgctaccttgaaatcatagggaggcgactgatgtggtttgctaaaagtctccaaaaatttcaaaggagaatagctcttcagtcaggtgctagtgccagcacaacaaaaaagagggttttttccctcatttggccagggcatggatttggaccatgtgggtgtcataatggagtataccaagtgattttgttcctatgatgaaagtgaagtccatattttgtctcctgtcttttagtaaatcagtatagataagtcttttttttttttttccccccgagacggagtctcgctctatcgcccaggctggagtgcagtggcgtgatctccactcactgcgagctccgcctcccgggttcacgccattctcctgcctcagcctcccaagtagctgagactacaggcgcccaccaccatgcccagctaatttttcgtatttttagtagagacggggtttcaccatgttagccaggatggtctcgatctcctgacctcgtgatccgcccgcctcggcctcccaaagtgctgggattataggcgggatccactgcgcctggccaagtctttttttttttttaattattttattctttatttttttccccacatattctaaaataagtctcttacagtgtctaggtttctttccaaaggtgattaaaaatgaagcatcatattttaaacttctgaggcagaactgctagaacaagagttttgttttttttttttttttgagacggagtcttgctctgtcgcacaggctggagtgcagtggcgcgatctcggctcactgcaggctccgcctcccgggttcacgccattctcctgcctcagcctcccgaatagctgggactacaggcgcctgccaccgctcccggctaattttttttttttttgtatttttagtagagacggagtttcaccgtgttagccacgatggtctcgatctcctgaccttgtgatcctcccgcctcggcttcccaaagtgctagaacagagttttgataatttgtttgaaacgaagcactcaaatcttctagtttatttgcatttgcagtcagacctctacagatgccagctagattacagatggctagcataagtttttttcattacagaaagaagaaatttagagcttagtgcggtctattaaaagaattaaaggttatgtcaaaggacaactataagaaagtactttggttctgaatattgcttcagctagggtttattttgaagctcctagcccaaatttgtagaaatgcaactaagatctaatatttagtgtgtaagaactttacaggacatccagtcagtagtagtcttaaaagtgaatcacataggctgaagcaggcagatcacctgagcccaggagttcaagaccaccctggccaacatggtgaaaccccgtctctactaaaaatacaataatcagctgggtgtggtggtgggcacctataatcccagctactcaggaggctgagacaagagaattgcttgaacccgggaggtggaggttgcagtgagctgagatcctgccattgcactccagcctgagcaacaagagcgaaactccgtctcaaaaaaaaaaaaatgtgaatcacatacataaacattgggaatttgcagataactttcattttagggtttctagagcgcagtggtgtaatcttggctcactgcaacctccacctcctggattcaagcgattctcctgcctcagcctcccaagtagctgggattacaggtgtccaccactatgcctggctgatttttgtatttttagtagagacggggtttcatcatcttggccaggctggtctcaaactcctgacctcaggtgatccacccgccttggcctcccaaagtgctgggattgcaggcatgagccaccacacccggcccacttacaggatttttctcccccttcatggttgtataaatgcagtacttggcacataggcaaacctgaacagtttgcaagttgcctacccttttctactttggataaaataaacctcttaaaatagcacttaacatagtaatatatgtatattaatagtagttacttcatgtttgttgaatgaatgaatgaaaaaagtagcaaatctacataatataaatcccaagacagccaggaattttatctggacctaattgtcttacatagcaccaattggtacttaataaaaacaaggctgggcatggcagtatgcgtctgtggtcccagctacttgggaggctaaggtgagaggatcgcttgagcccaggaggttgaggttgcggtgagctgtgattgcaccaaagcactccaacctgagtgacagaccctgtctcaaaaataaaaataaaaacaattagttataactcagatgttgctatctaaggtaagtagtaattactataataaacaagctatatattaacatcttaattttctttcctctgaactttactactgtaggtgtgtagtgaacttcatacaagttaatctttttgtagctctatttcttcatttctgtttgttcatcggttggagaaattttgcttaaattaatgaaagtaaaaatacagatattaatggctcataaatgtgcacaacccacttcatctatagtaagtaaaagtggctcccattttggggtttgaaaatgaagaagatctgaattcacagagaggaggcacgtgtagagatatgagaagttcttttcctactctactttggtacattggtctctaacacatgttctgagcctcagaacacagtagaacagaaccttcagaaagtgttgagagtataactctttaaagaggtttagtcagtctaaattatttgagggcatcatctttatttggtacttagaagtctaaaatcttcctgattgttgttaaggttacaaagagtctgtgtattgttggttagttgagcagtaaatacctttttatcattgttaaatgggttgtaaataaaatatttttcttcagtgttaaaataatttatgatcacaatatttagataataataataataattctgttatttatgatatgtagtcttatcctactgccactcccctcttctgctccacatactactaagtatgacttggtctctataatacgcactaattatgaagttttttacggagaaggaaattcttaatatagactaggattttttttcagttgtcttttaatggccttttattctagtaaacttagatttcttatagacatcggtttattgtgccgagctcagtagctcctagagggagtataaatttaggcaaaggaatcaaggaataaactggtattgtagaagagatgggagaaaaggaaatttttatttttgctttaaattactaaatcatgatgtttcctgtctctcagtgcttaccccaatcagtgtttctctcttttcttttttcctttcagtcccgaacccctaaaattctttgcttgcattaacttgcttcagattataagcctaattttactgttccaaatacatgaacttttcactgtatctccaagtgctcttttagagttcatctctttgttttccagtaactcatatttgtttcttcttatgcttaacacttctctctcatttttttttttcatgtttctcacattttttctttccacattatctgctgtagcaaacttgaaatatatgcttttggagaagagtaaaaacagtgtttagccatattcaggttattagcagcagctcctctttcttcacatatacttaaagggaccagaaagttatttaagctcttacttgctacaaatgctgttccatgtgctcctatgagtcagcacaacaggtattttttttttttttattgtacagatgagaaaactgagactttgagacattctatgaattgcctgagctagttggcagcagtgccaggattcatagaaatttggagcaggaagacaacacaatgaagattttactttgaggaatttagggttcatctatgtaaagtgatttttctgaggtcactaattatgttgtaggctagaactcaagtctcctaactcctaatatagtgccttttttttcttttctttttttatttttttaggagatgggtctcactatgttgcccaggctggtcttaaactcctgggctcaagcaatcctcctgcctcagcctcccaaagtgctaggattacaggtgcaagccaccgcacctggcctctaagagtgctttttcctagcatacttttcttctcctaaggtaaaaggctgtttgtcatggtacagctacggtgattttacttgagatatttgactttgagatggagatgaagataagtatataatgcagctgccacattcattctcatacaaggtaaagtcattcaaaagataaatcgaagaactatagatgtatttaagaagaaattcagcctatatgtaacaacaaaattttgaataatcaagttcagaaattggatttttaaaaacttattagctactttaacccttttgaaatattcccaaaaagtgttttctcttcctgagttaaatttattcatttattgacctattaaagatttttttagtgcttcagagctattctgtatatctgttcattttcgttatttagtagtatatagaagtaatagattgggctgaatagatttatttcaggatatatcttagatatttgtgttttttcatgaatcccagtttaagggttattgctttcaaaaggaagaaatttggttagtcatgacttttggctagttgaagtttagagaagtgctttatacaggatcttttatttagtgagaaaaaaataactttttataattttataatactgtgtgaaaaacctgataccaaaacttctgaaaaagaaaccaggcctaggagatgaggattctagggaagattattaaattgaggatatttttaagttagattctaaattagtaaatcgtggctaataagatgaaaataatctgatcctttagtaagatctgaagtaatattgttgccctgcaaaaaagtggttgttatcagcataccttatatgtcagcctaagcaagattagattttctcttttctctgatagatgccaatatttaacattgacttttatctactttcaaaaatatctatgaaatatactttctgtctctgaattagagtgtatgtatatttgtgtttacttgaaatgttatagctggatgatagatttcagagcagtttttatgcttagggaagccactgcctcccaaaaaggttttcttatgagaatgaggaaaataagtataaattttcatatttatgttattactattgatgtgcttggataattgtatttataaaagtaaaaaatgttcagtattttatctgaaatttaataatggatattgtacagcctaaggaattaaaagaaaaaggaccctttgagaaaatggcttgttcttatgtatcttaatatatactgtgttcactttatgttttgtcagacactgaaattgaggaagagagattttggcgttctgttggtttatggagagagttgatcagagattgctccttggctgagttgctgtctgcataggctgttaacaattgtttctctggcagcagatcttgttcatcaggattgcatcatttctgggagaatggccaaggtccacagcctcaatacaaagactgtctgaagcatatgaggcctgttctctttctgaagcggcactcctcttcctgccagtcctcttcacaggattactgaagcagacttgttctgaatttctttcgttggattggttgtttattggacttttgtctgccagctgcttccgcctcacctgtctgatgcaatttcttcttctgaaatctgttggaattgttcataaaacactttttgtttgtcttctctgtgagtgaccagggagatcatacaggtcttgtgctttcagcaagtcatatagagaagagactgtcagaatgatgatacagagactgttggccatttctgaaaccaattaaaaagatggggtaattaagaaacatttctggcatgttctatttaacatccttttccctagaaactgtatgtaaatggcacctcctaaagagagtactcggtactactggaagatacaggctgtgtctgtttctgaatccaagaacttactagtgttcctgtggattctgatggattgttctggaaatagttaaattaataataaattgaaactgtgatgcattcatttaccccctactgtacactcacatctatttcgctgttttcctcctttcctttttttctttcttatttgctattgcttcttccttgatttactttatttcttccttccttttactgttactttgatacttttatttctctaattctgggtgtactattttaaatcgtttctaaaaaatagtttattttccagttttttaaaattagaaatcataaaacatcaacataaatgaaatgcatgcgttctaatgcttggtaactggaatcctatgaatagctcttttcatgtttatgatatgttaatctttaaggtgttaataactctggctagcgttaaatttgacttttaggaaaaaacaccagagacttaaaggatactgatcattttcccttcctttttggaaggtagaaaattaatttaagcgccattttttaagcatgtttccatttgaccgcaaatagaactgactcctttttatcactcttttttatagtaggacaagaaactagatggtgtggaatgaagggaaagaaaggagtaataaatatggacttgtaatttaatgggtgatgatggccccttgtctggctggacagttgtcggacatcgggttaaagaaagaactctgaatttgagaagtgttcagtgaagaagggaagcaccttttaggagagagaaaaagaagggatcccttggaaaatgagataattctaatttgaaggaagaggaaaaattagccagtgacataagtatttaccatttaagtcaaataatttccttctctaccatctcgtttctggctttatggaaaaataaaaaattaaagggcaaaaaattcagtgccggatggacgtagggtggtaaacgagatagtatagatgtaggatgataaacaagacagtatacagaaacataatatagctgtagaattccattctgtgtgttcatcaatgttatttctttctgtactaatttttgtctcaactttttctaggtcttcagaactactagcagataatttggggggacttcatattcagaagtctatataaaggtgactgacccaagtaaatccttttaatttctgttttattttttgcattttaatgactgctggaatcatgttgtagtaaattgtgattataatttacttagcagatatttctggaacttctctacgtgtcagttattgttttggccattgaaactacagcagtggataaaaatccctgttctcatagagtttatattctggtaggaaaaaacaaacaaattataataagaaaatactgcatttagatgatctgttaaatgttcctcggttaacattttaatagctacattttacagagttacttagggaaggaactattcttagggtaatatttgagaaatttgggattattaacagaatttgaattaagaagcctcatcattattaaagcattagttagaatgagatggtcaagctaacctattatggttgctttcatcagaagaatgaaacagtcatgttaaactagacacaaggaaaatggaataatttttatgaaatagaaatttatagttaccgacaatgtttctttttttttttttttttttttttgagacagagtatcattcttgttgtccatgttgaagtgcaatggtacagtcttgactcactgcaacctccggctcccgggttcaagcgattctcttgcctcagcctcccaagtagctgggattacaggcgtccgccatcgtgcccggctaatttttttgtatttttagtagagacagggtttcaccgtgttagccaggctggtcttaaactcctgacctcaggtgatccgcccacctcagcctcccaaagtgttggaattacaagcgtgagccactgcaccgggctgacttaatgtttcttaaggattcatcaactatccaaaatagctgggttggtgtttcattagtgaatgtagcaatcatttattcactcattaagatgttatctgaagtaacttttccatcttttccttttagtatatcttttaaaaattgctctaggaaaaatatcaactatcatcttgggtttataacttgtcttttatctagaaactgtactttttttttttttttttttggagaaagagtttcacttttgctcaggctggagtgcagtggccctgtctcagctcactgcagtctctgcttcccagattcaaacgattctcgtgcctcagcctcccaagtagctgggatcacaggcatatgccaacatgcccagctaatttttgtatttttagtagagatagggtttcaccgtgaaaccatgcattttttaaatgggtgtacagtcgtaatggctacaacaaagggtttttaatgatattaagtacggtttttggtttaagtcttttactgaaaatataaaacaattcagattccctttgctgatcaggggaggtacggtgataatcagactttcatatgattatctggtcagacagctttggggcttttcttttaatctgaattatacagtaagactaatagaaagagtagtgaccaacagcccccagtatttaactgtcttttgggtttacttgatgagtgttcttgttttatcatttacagattttacttcaatttcccaaaggcttagaagatgtactgccaaggtctctgtttggatatactgttagggaaaggaaacatacatgtgtaagactggcctaaaggcaaaaaagttcatcagtccctttttttttttttttttttttttttttttttttttttttggcaacagggactcactttgttgcccaggctgagtgcagtggcatgatctcagctcactgcaacctccacctcccaggctcaagcaatcctcccacctcagcctcttgagttagctgggactacaggtgcatgccaccacaccagatttattttttttttttgagatggagtctcactctgtcgcccaagctggagtgcagtggcgtgatctcggctcactgcaacctccacctcctgggttcaagagattctcctgcctcagcctcctgagtagctgggattaccagcgtgtgccactacagctaatttttgtgtttttagtagagaaggggtttcaccacattggccaggctggtctcgaattcctgacctcaagtgatccacccaccttggcctcccaaaatgctgggattacaggtgtgagccaccgcgcctggcgcacaccaggtaaattttgtatttttagtagagacaggatctcgccatgtttcccaggctggtctcgaactcccaagctcaagcaatccacctgcctcagcctcccaaagtgctgggatgacaggaatgagccacttcatctggcccagtcatttcccagcccagctatatgtcacctccaattgggtgtaggaacaggcgtattgtcatacccagaggtctcacttcatcatctaggctggagtgcagtgcatgattatggctcacctcagcctctacctcctgtgctcaggtgatcctcccacctcagctcccaagtagctgggaccacaggcacacatcaccatggctggctgatatttttttactatttttgtagagttggggtctcactatgttgtctcagctggtctcaaattcctggactcaagtgatccttccaccttggcctcctaaagtgttggtattacagttgtgaaccactgcacccagcccacaattttttttatttgcattaatatcaaagtaagattggagcatctcagaccatctaccatttacaatttacattaaccggccaggcacggtggctcacgcctatagtcctagcactttgagaggctgaggtgtgagtggatcaccggaggtcaggagttcaagaccgcctggccaacatagtgaaacttcatctctactaaaagtacaaaaattagccagacatggtggcaggcgcctgtaatcctaactacttgggaagctgaggcaggagaatctcttgaagccaggaggcggaggttgtagtgagccaagattgcgccattacacttcagtctgggcaacaaaagtgaaactgtctcaaaaaataaaaataaaatttacattaaccccctgggttgactcagtcggtatcatgtacttttcattcctttagtttttttagtattaataattgttctaatgtcttattatgaatcagtgtatcagtcatgactctctttgtagtcttttttgcaaaagtccttgttaacatgggtctttgacattcacattgactttattcccccccaaataaaatgctttttgtttcatcctttcaatgttttttacactactgtaaaactactaatgtaaagtcacacaaagaacacttgtttccctctgcaccatacctccaaatctcttaatctatttttgcatttttttatacttcagtaatttctgagtctttctgttcccagctttcactggtttatggtcaccatgtcaagctatcctcaccgctttttcatacacagttgtttagtctttatcatgaaactgtactcttcgtgatttcgggggtttttttgttgtttttaaaaagtagtcaacttttttagagcagttttaggttcacaggaaaattcatcaggagatacagagatttcccatgcaccctctgcacccacgcatgcatagcctcctcctggtttatatttttgttcatatctagcagcgtattattaccccacaaataaagttgctaagatgattgcatcttctcccaaaattatagttaagatgatttaaaagaaggaagagagtgttcaatgacaaaagaaggcactaagaaacagctgtttccaatcaagtataaacaacaaattgatctcttttaatttggaagaaataacattattgactgcttgtgaaactgcatttatttgtggcctaggaaaaaaacttaaatgaagatcttgaatttttaaagagtttaggtaaactgggatatttttaataaccatcctttatcttaaaacttgtttgctatatcctaggctgccagaaaattttgtttgggcagttttagaatggggagaatgtgttggttagtgagataggcagactcttcctttcccttcaactgaaaagaaaaacaaaagtaaacataactttttgccccctactttgtgaaacattaatgaaatgcatagtaaacatgggacactgtggctgtatttattttataattatcccttaaaagccttattcaagaatgcagaaaaatattcagtaacatttaagataaacttgaagaactatctgataactaggtatttattttactagatattttccttttctgttacaggattcctcatgtccataacatgttggatgaggctctgcagctcacccccactctcagagtggtcagtctccattaattggaccccgtgatttccaatctctgctgtgttggacgtcatgagcattgcaatccctctgggagtcaccacatcagatacatcctactcagatatggctgctggatcagagtaagtgctactttctaggtagtaggtacattatcagtctgtgtggagacagccttcttatggatagctaataggataatatgtagtattttcttaaccagatcctattccactgtaattaacattagacctttccctttacccccattgaaggtggtggaaaaaaggaattagaaggggaaggaagagttttcagaggggtatttctgggcaaataattaatagaaccaaagttgcaaagtaggaattcattttcatttgttttaatgggtggagaaaattggaataaagtaggtgttactacctgcttctgtagagttaatgattctgatggagggagataagaaggtgttctttccaactgattttccttgaagtcctcttcctatgtacttcccattgttctagagtaaaggggccgaaactatatgggcaggttgcctagaccttctgacatctggggtagaaaacatggagaacagcgtcatctgtttttttataatattcgttgcctagaaagaggaccttcaaaatcagtggtaccaaacttttttttcagctaagagcagctttaggaattcagagtttgtccaaaggcccaatccctaaaattatactctcaattcttgaagaatgtaaatgccaaatgacaatgaaggtaggccttcattatacaactttatatatattattcacagttttaaaatttttagtcttttgtatcccttctcttttaagttgtccgagattccccctgctcacagattccccctcttgtccttttacctcccttgtacccaatcttccttgcttacagaaaggaagtggaagccccctacctttcaagacgaagtggcactacaccaggatgtgaaagtccagcgaaagagacccaaggggcctagggggcagcacacccccagaagccaagtctattccaggcagtaccagggattagggtctgggctggaaaaatcctggtgttttgaatatgttcaggtccagttcagactcttgatcccacagccacttcttgagtgaggtgggtgttgctctaattcccctgtttctcttgccattttcacagtccctggggattcttcccccttcagcaaagcaaagcaactgtaccagatttctgggttgaatgacatccctgattaataagtggttttcttccttaaaacagaatattattaaagagcatgtatatttcttcataaagccacctaatataacttacctgtttactgagttccttaaagaggaagacttaaagctaccctgagaaatagtatataatattctggggtagtctaaaatgaaaagcagtgtttgggcttattcccatataaaaaggagaaaggagggttgggggtggggaagggttgattttgtttcttctagagcttttttcttcttttgtttttgtttgttttgttttgtttgcatgcaaaaggtatttagttatgtcagtaactgagacttacttaaccattttacaactctttccccaaataaagtacttaaaactctccctgcattagtaggtagccagtttgtattgtgtttataggtttttataaagtcagctactaacctggtactatgtagattgtctaactgta

SEQ ID NO: 347 - DNA, 25403 bp, Homo sapiens
  source 1..25403: mol_type = genomic DNA
caaccgtgctgcatctaaataccccaaaaccaaaaaggtaagtcacaaatgcatcctttataagtccagtctggcaagggctgtcttagtgaaatgagaggacctataatccctagaagaaactaatctcaatattactagattgaaagttctaaaatgctttgacacaaaaggctggagtcatcctgctacctgtttccttatttttagtcagcttaaatcactgatagctgaaattattcctctcttagtgggcgtggagagggtgaaggaagatatccttgtgttctagttgctcaattcattcttactgcagctgctgcatctcctcctgtcctagtttctagatgacgtttgtctttatgaactacactgctacctcttgatttataaactaatgatctcttttttaccttagtatctagttacagaatggttgaatgacaaagcagagaagcaagagtgccctgttgagtgccctttacgtatcacaacggatccaactgtactggcaacgaccctaaacatgttaccaggtcttatccattccccgttaatttgcaccacccccaaacactacattcgctttggctcaccctttatccctgagagacgtcgaaggccccttctgcctgatggcacattcagctcctgtaagaaggtatgtctgtgtttttgtgtgtgtgttgtgtttatgtgtgtgtgctttatttttttaagcctaagattcctatcatcatgacataaataaaatgttctctagatagccactctgcccatgtgagtttataatgagttagttgttcagccataaatactgattcatcaagagtctgtgagactgtggtggaatgaatgtactgcatttttagtgctcagatttgtgactggtcactgatgtctcttctgagaacccttgaggttcctgagtgagagcacacagcagtggatgactgggtagagacggatatgttttgtgtgtgctcttgtgatatgggttaacatgtccatttatgattattgtgtgagattaggccctgggtcctctagaacactgttgcataaatgaaaaaaattaaattgttttgaatcaattcaaccgttattatccactatcatcacttgaaggaaattagaggaaaaatcctattgtaattggcataattcctgttccttgatcaaatgacaagtcggactgtttattccaagagaatacagaatctaccctaaaagactctctttccctctctgtttctgcctctttctcctctttccagttacttactgtttttggatctagtggcagtagcgtttggtggtgtttttggaatgctctttcttaattcccagaagccctgcatattttccaaaggtgtctcttaggaatagatcactccctcagatctatgatgtcgttttccatgtttctagaagtataggacaccctttcatttggtcttcctttgaggtagagtctgttccctggaacacccttttctcttatcctcagatctggattcaggctgccttcctcagtgtctgccattgccctcctccactggcatcacgtacatgaggatgctgcatgtagattatttgatgtgatgaagtctccaactccaggcaggtcttccctgactcctccaaacttaaaagcttttctctttccccaaagaacagaagttatttctccgggggaggggggcatgaaagatgagccaaagtggtgtgggatatggaggggaggagggcaataggaatctgcaaaaaggaaggacactactgctgaatgagcagcacattgcagaaagtcttttcctaattgcacatcttacctaaacattggaatcactcattggtttgttcggggaaacgctcgtagaattcctaaagagaaatttgaccatttctaaggatgttaactgttgaagcatcttatcaagccaggtcgtacaatctcctattttggtcctttaaggagtgtaggcaattatttattacagataagtaatgaagtctgagctgcaaataatatgaactaggctcttgaattgaaattccttcttgataattctaatgctgggttgcagtctttctgtttccatcttttccaactagcagagacttaacgaaaaccaaaaacgtgtctaggactgtaacttcagatctggtagaaaatgcatttctttaagcttttttaacttggttctgcttttatacttgtatctatagcacatccttaaatttctacgggcaacagatagaaattccatttaacacaagtccctgttatattctccaagtgtatctgactatccttaatctcatttatacaggctctactcaagcacttttatctatgtgtcatggttagtctttaggaagagtttaggctgcatacacaggattatcataacaagactatttaaataggatctttaaaaactgtttaagtcattgctttattgtgtgctgttcacatatcaagattctattttttaaaatacagctttttatgaggcaaaataaaatgaaatggaatgttttagctagaatagaatttggctttatagcagtgaagaagagttcttcttctaatattggtcttcttctaatatctcctaatattggttagaaaggacttacctaatgcagaacctaagaacattttcattattcaacaaaattgtaataaaattctgaaaatccctcagagtataagttaatcagatagataagaaaaccctccatgggattatttagaacaatgtatatttctaataggctcactgtttcatatctcactaaagaggtaagggcctggccttgtaagttaaaaacttaccagtataggacaaattaaagttgtatctgtatagttgtactcagattcttatgctatttatttttatttttatcattattattctgcaacttctgaaaagaagaggagttcaggtatttgacagaacattttatgatatccctagagtttctaaattgaatcatagtttttaagaagcattttgcattttttagttcctcagttggtattttaaaaacatttataagtggccaacaaggctctcagtagtgtttcaccttgttctctctaaactcctcttctaaacacaatgtgtatagggcatttggtctccagacttcttagaaaaaccagtctgactgataatgaaacagtgtgctttgcattgataattaatatttcattttatacactggagcattatctgtaaatctccaaacatagcattgaaatttagttgaaccgggactcggtgaaaatctgctcagtgttcagtactgtactataagctttcttcacatacattatctcacttaccatgcatgaaattgggatcattgtcctaaatttatatatccagaagctttgtctcagaaatgtttggtaacttgtccaaagtgaagcagctaataagtgacacagccagatttcttctggtgggggatagtaggggttcacagggtctcactgttgtccaggctggagtgcagtggcatcatcacaggctcactgcagccttgacctcctgggctcaaatggtcctcctacctcaacctctcgtgtagctgggaccacaggcacaccaccacgcctggctaatattcatattttttgtagcgacagggttttgctgtgtttcctaggctgatctcaaactcctgagtgcaaggagtctgcccaccttggcctcacattctgctgggattacagatacgagctactgagcccagcctcacagccaagtgtcaagccagggcttctggactccaaaacctgtattgcttccttgctctttcgccataatagcgagacctttaaaatatttatccatctttgagcctcccagaaaactcctttgcaatatattttaatagaggttcagagaagggagaaatgttcttttgattttaacaacttgctgagtaggtgcatctaaaattaacttattatccatgaggttaattgtatcttgttagatacaaacaaatgtccatgttccttttttatatgagtcctgaaatattgtaaaattatacaacagaacctggaggagtaggtttgattgtatttgctgtgtttcacctcatagctaaccatggtagcatctttcttctagaatactcctgttctgattttatgttccctttttgtagtcatcagatccagaatgtaaattattttacaagtacatctactagaccctggaaatattaaaaaattactcagataggaaagcttagtgaccccaaatgagtgttttctgctttgaaaagaaaaacttaaaggtggccataacaaaagatttttcactcctgagcctaatttttccatttataaaatgagtgctttggacaagatgacttctaagttctcttctaagctttaaggctatatgtatggttctgacaattcatctttacatcattattctgtatctaagatagttcattcttcggattttttattttgtttttgtgtttgcttttcagagacctggttgtatcctaaaatgtttacgtgattcaaattaccattgagagctcttttttatatccttgttcactcttccttccaagtgtttacaggtttacagtttcagttttgctttcatttggccagccacaatgacatttgtatgatgtaagatttttttttttttttttttttttttggtaaaatttttgtggattgtttcctaggtttctaagagggaaaatctatgagaattgctctctggtgaagagagtatttacttacctgtaatacatgttctctaaaggtataaattataataattcacctttgctcttcctattgggggagggtcttactcagaaattgatgtttatcaaaattcgatctgtcttatgtcagggcaggagagccacagagtggtgagcaacctacaactgtatatcttaagagaacacaattacaggtaagaaattttctgtcttccacaggatacataatcttattatcctaatctttgcaggtttactatctggcctaaatttatttcttgtcagtttattattctaatctttactaccaaaaacttgtgactgataggtcttctttttgactttttcccttttttttgatttctactgaagctcatttcgtgatttgcattactcatgcataatttaaccaaactacttgttggaggggggagtcccataggttatttcatttgaaataaaccttttggaaacgcttttggtacctgtagtgaagagctattaatcctcatccaaaatcttccaatgaatcttttttattacctcttcacacgtctctagcacggggcagacaacttttaagagatctttatcttccttctaggcgcttattttatatattagttttattctatacgatcacagtctctcctaaataaatgttaagatttcttcctcagtcttgccattttacaccatcccaaatggtatgaaaagttgaatagcagtcattttttattggtttttgtcttttgatgggatctcattatatgtaatccagatttcctcaagtttttcagttaaaaggaattgataggacaatgttccaatatgctgagacacaagacaataaaatgcttgactgtgtaactgaattagtgtgttgaattgtatcactcaccagttgatgtacatttaaaacaggtgcactaaatagttttagataattattgataattctctggttcttttcaattatagcgctggataaaacaagccttagaagaagggatgactcaaacatcatctgtaccccaagagactagaactcagcacctataccaaagcaatgagaatagtagctcttctagtatctgcaaagacaatgcaggtacgtatctaaaacctttctgattatatgaccaatgattgtttcaggtctgcataaaaaatttaagtatgagtatttctgatacaaaaagaaatggcgtgttttctaaatagttactttacatctgtctttacagaggaagagagagatctcaagtcagggatcagttttcccaggacgacaaagaaggactagacagtgtacagataacagcagaaatggttataaaaaaggttagatacatttaaagtagtaagtttaggaaatttatattcatatttataagatggggcaagggcaagaaagtggtggaacactaatattcaggaaagaattaaaattctgagtgattaagttgggtgggacatggttgagggagcaggggatgaatgaaataagtgaaaaattattatcaattgattgttttcaaaggggcttgtataattagcatacaatttttaaaagaacagccgggcgctgtggctcgcacctgtaatcccagcactttgggaagccaaggtgggtggatcacctgaggtcaggagttcgagaccaacgtggccaacatggtgaaaccctgtctctaccaaaaatgcaaaaattagctgggtgtggtggcaggtgcctgtaatccctccctaaacaggaggctgaggcagtggagaatcacttgaacccgggaggtggaggttacagtgagccaagatcacgccactgcactccagcctgggcgacaagaatgaaactccgtctcaaaaaaaaaaaaaaaaaaaaaaaaaaaacaaattttttaagacagctttaaatctaaagtctttgtgcatttttaaactagatgtcaatgaaaaatcatctgttccattggttttgacagtgacttgcaaaggatgtaattgaaagcacttgtgatatcttaatgtattttgtgacaatctttttaccagtttctcctgcaaatatcagcttaattgaaaagttctttgtgattttcataacttttctctaaatcagttttttaaatattagacaatcaaaataccaaagtaaattagatgctaaagcaacctttcaggttgcaacaaacagaatatttcacattttcataaaaaacccacttcattgttcctgtttaccaacttgctgaataaatgtaatgaacttgaatttaattagataaatttttagtagcagatattgcaactaaaatcagaacttttcttaaagttcttacttcatttggattttacttctttttagattttatttcagaaaacgtgaattgcctttttttctttttttcttttttttttttttttttttttgaaatggagaatcaagcgattctccctgcctcagcctcccgagtaactgggattacaggcgcccgccacctcacccggcaaatttttatattttgagtagagacggggtttcaccatgttggccaggctagtctcgaactcctgacctcaggagatccgcccacctcggcttcccaaagtgctgggattacaggcatgagccaccatgcctggctgtgaattgccattttttaaattatggatttagtttattcttttgtctctagattagattatacctcataagttaccacctatatacctcaggataataaaattccagttatctgaaagataaattatactgtttatttaaaatattttcttctagtattcaccaaaaattagggatatttagtcaaatatgaatagtataaagaaatcttggtaccagatttccatttgtattatttcttttttaacagcttttaaggtgttagtaagaatataacttagctgaaatagactatcatgtttgtgtatctatctggtgtgtgtgttaatgcatgtgtatagttaaggttgggaacaggagattgcatagcagttcacatcctgactagcaaaggattataggaaaagtgtctttgttatcacatgccctggttggaaggaaattaggattcctagtcaccagccttttttgttattgttgagcttctgccctagtctaacagtgagaaacactcacaggacacaccttgcccttaaaaagcaatgtaggaaaatatttgattttaaaaatcaagcagcagtcaaatgcgcaagttatattgctacaaaattagcataaattctgaggaattacttttatttgttggctctcttttgtttttttcaagaataccaaagagacattaagaaaggggaaaggatttctataatagaaaaaatcaaacagacctttacttgaaaaccagctgtcccctttactaactatatgatgttactagaagtctctgaggctaggcgttggtggctcacacctgtaatcccagcactttgggaggccaaggtgggcggatcatctgaggtcaggagttcaagaccagcctggccaacatggtgaaaccctgtctctactaaaaatacaaaaattagctgggcctggtcacgtacctgtaatcccagctatttgggaggctgaggcaggagaattgcttgaacctggaggtggaggttgcagtgagacgagattgcgccactccactccagcctgggtgacggagggagattctgtctttaaaacttaaaaaaaaaaaaaaaaacaagtctctgagcctcatttgtaaaatgggaatagcaatacctgctttatagagctaacattagaatgaataatgtatataaagttctcaatatagtatcaggcccataagagtaattattatacggtcattattctacacagaatactctttcttgtagagtatttgtggattaataaatacattaaagattctggctgggtgtgatggctcacgcctgtaatcccagcactttgggaggctgaggcgggcagatcacgaggtgaaaagattgagaccatcctggccaacatggtgaaatcccatctctactaaaaatacaaaaaaaattagctgggcatggtggcatgcacctgtagtcccagctactcaggaggctgaggcaggaggattgcttgaacctgggaggcagaagttgcagtgagccaaggtcacgccactgcactccagcctggcaatagagtgagactccgtctcaaaaagaaagaaagaaagaaagagagggagggaagaaagaaaagagaaaagaaaagaagaaagaaatacactaaatattttaagttcctaaaagctgaaactttatagaaataaaagttattatcaaagtagggcaggggcatgatgttcattatttgtaaatgatgtgggtctattcttagaagagcctaagtaatcagctgaaaaacttagaattaataataagagtttaggccaggcgtggtggctcacgcctgtaatcccagcactttgggaggccgagatgggtggatcacaaggtcaggagatcgagaccatccttgctaacacagtgaaaccccatctctactaaaaatacaaaaaattagctgtgcgtggtggtgggcacttgtagtcccgctactcggggggctgaggcaggaaaatagcatgaacccaggaggcggaggttgcagtgagctgagatcgcgccactgcactcctgcctgggcaatagagtgagactctgtctcaaaaaatatatatatatactaataataataataagagtttattaatatcactggatagaaggataaatatataaaaagtgtaaatatattttaaaaaatcatttatataccaagaaagtaaatgaataccaattttttttgttcccaaacttaacaaaactaagaaactgcctaggaataaccttagttgggtatatggagtaaactgttactgagaaatatttttaaagtctgaggaaatggaaatttctttttctttttttttttttcatgaatcatacgtgagcctttgataaatttcatgttcattatggaaagaatatatatatgtgtatatatatatttctttctctttctctctgtctttatatagttcccatgaaactgccttgtttttggaatttgattaaatgattctgaagtctacctttaaaaaaataagaaaaaaattgaaaaaataataatgaagtactttctcttgaggtgtaagacgagcttctagtatgaagctaatagttaaatttagtataatattgatgcaagaatggatgtatatatggaacaaaatagtcagaataggcctaaatataaatgtaaaagttggtaaattgtcatggaatttttagttaggagattgaaaaagaattagaatctagctggacacggtggcacgtgcctgtaactctcaactacttgggaggctgaggtaggaggatcactcaagcccaggagtcaagttcaacctgcgcaacacagcaagaccttgtcttcaaaagaactactaggtcctttgccaaagaaaattctaggcacattcaaatatatatatttttttaattcaaacttgggcctggcatggtgactctcacctgcaatttccagctctttgggatgccaaggcagaaggatcacttgaggccaggaatttgagaccagcctgggcagcagagagagacccacatctctacaaaaaataaaaattagccaggcatgatggtgggttgcctgtagccttaaggaggctgaagtaggaggatgacttgagcccaagaatttgaggctgcagtgagctgtgataatgccactgcgttccagcctgaatgacagcaagacatctgtctctaaaaataataaaataaataattcaaactgtattaaccatgtttttgtgtctatactgcctctgtattaatagaggattagtacattggggaaaggatttgcagtaaaactgccggggagtaatatccctgctagcaatctgataaaatttatcatgtgcattaaaaatattcataatccttaacctagtagtcgttcatttgttctgcttggtatctttcctacagaaatagacaaagaaaccaaaatttatatataaggttggtgcaaaagtaattgcgtttttggaccattaattttaaatcactgtaactagactcagacacatctttattaatcaaaataggaaccactgcaatcaacacatttttgccactgagaaataagtttgtttattcctgtagcctaaaaatctatgcttcaggattcgacaaactcttggaaaatattttctgcatcctgctggttgtggaagcaccttccctgtaaaaagttgtcagatgcttgaagtggtacctggttggcgagaggtcaggtgaacatggcgggtgagacgaaactctgtagtcaaatttgttcagcagcttcagaagttgaatgaattgtttattagaataattaattcttagttattaacaattgcaaaaactataggttaaaaataatctgaattccaaccccaggaatggtagaatttgtaattttatctgcttgtgcacatacttgtaatggagtatcatatactatttattgaaaatcttatttttgattcattttatcaaattaactccctctacccccaaaaacagcgtagtaccacttttgaattagatttgtgatcttacctagcaccttgaatttgtaagaatattaaaagaatagccaggtgtggtggctcacgcctgtaatcccagcactttgggaggccgaggcaggcggatcacgaggtcaggagatccagaccatcctggctaacacggcgaaaccccgtctctactaaaaatacaacaacaacaacaaaaaaaaaaaccgggcatagtggcaggcgcctgtaatcccagctactcgccactgcactccagcctgggcgacagcgagactccatcaaaaaaaaaaaaaaaaaagaatattaaaagaagaatatacgatgactaaggttccttctaggaatgtaaggatgagttaatatttgaaaatttaataatcgtcatttgttagcaggtcaaatgggggaggagaagtcataacacagtgacttttatcaatttaatgataaaataacatactatgatcttttaatatctagctgaaaaattgccagttgtcatgcatcatgaaaactagttaaacatcaaaataggctatcaaattatcccactattaccattattatttaatatagtctaagtaattgttagccaaagtaattacaccaaccccctcccccccacaaaaaaaatcaacataagagatataagtactggtaaagagggttaatgtgttatcatgtacaaatactattatctacctagagagttaattgaaaaactggtagagattaatagggtaactggataaaaaataagtatgtaaactttttaaatgttaataacatttagataacaaagggagagatacgttttattcatagtagtaaaaaaaaaaaactaaagaactctggagagtaaacttaattagacatgtggtatatatagatgaagagggacataatatgtgaataacaaagattatgccatgttcctgggtaagaatgcttctcaaattactcctgaatttcatctaacaccaatcaaaatcctaacttttttttttttttttaatagtatgagcatggtcattgaatgacttctatagttcattgctagaatagctaaaatattttggagaactagaacagaataactggaatttccctaacaattttaataaaaagtatgctggtgttgattcagtattggacaataagtggaaagaataacattcggaaataaacattcagaagataagcccagtatatgtaagaatctaataagataaatatatttcaaattaatagggaaattatagttattctacatttacagaagattttggaagaaggtgctggctatttgttatggggaaaggatggattaattgctaccccatatttaagtatgttcttttttccttttttgtaatggcagtttgtcagtgtgaaataaaatgttcttttttaattaaaatctaaattaaaaattaaacatggagacaaaaggaaaataggctggcatttttacagtgtcagggtgggttagcaaagacatgatatcagaagcagaaaataaagtgatccgtttgactaaatagaaacaaaacatatagcagagacttgtaaataaaattgaaggcaatcagtaaactgggaaaatacatttgtaattttattgacaaggggtcaacattcttactatttaaagagcccttacagatgaagaaaaagaccccaacacctcagtagaatgcaggctgaagaacatgagccagcagttctcacaggactaaatataaactacacatatatagatattcttttgatttaataatcctacatgtagccatttgttctaatagcaaaaaatgaaaaaaaagttggttaaattttgataatactaatgttgtgcagtcattaaacctgaactgtagatttctattcattgtcataaaatgttgaccatgtatttctgagtgaaaatagttactgagtagtttaggtaaggcaagagtcagtgaagcaatgtctcgataaaaatttaccaggatattagcatgcgtttatttgtggatatgattttcaggttgtgtatgtgctgtataaccttggtaattttttgagtaaaggtgaaaaataataataataaaagatggatagatttgaccacataaaatttggaaactatatatgcaggaaaaagagaaaaagtaggcaaatgacttggctttctttggcctgtaaacttcttaagggcagacatcaggtctcttgttgaatacagtatcataataagtactcagtaaatatatgttgaatgaatgccttgtacattgatttgcacgtggcagatttcacctgtatcttataactcctttctacaactaacttcatcacttaacataattgactttgatagttatagtgttggacctagcagtacagagatctgtaagattccattgtttaagacccttgaaatattaaatatataaaagttattccgaatataagccatgaattacatgtttgtttctgttttatacctaggcactttttaaaaggaggaaagaaaatttagtatctggaacaaaaggaagatgtgaatatacttccaatctaggaatattaaaaatcctgagatatcagaaaggaaaaatatgcatcttcaataattttttgcatttattcttccctcttcatctaaacatctcctaccctagtttagtgcctcataattctttgctaactactgtgttaactccagatggtttcccagttactagtctcatactgaccattgcttccagataatcttcctggcccaaaaattttccttgaaggcctggaataaatgtcactccttccatccaccaagccttggggatatactttaacctattgattaagaatatagatagatggagccaggcgcggtggctcacgcctgtaatcccagcactttgggaggccgaggcgggtggatcacgaggtcaagagatcaagaccatcctggccaacatggtgaaaccccgtctctactaaaaatacaaaaaattagccgggtgtggtagcgagcacctgtagtcccagctactcgggaggctgaggcaggagaatggtgtgaacctgggaggcggaccttgcagtgagccgagatcgtgccgctgcactccagcctaggtgacagagcaagagtccgtctcaaaaaaaaaaaaaaagaaaaaaagaatatagatagatggggccaggcgtggtggctcatggctgtaatcccaacactttgggaggctcaggtgggtggatcacttgaggtcaggaattcaaggccaacatggtgaaaccctgtctctactaaaaatacaaaaattaagaatgtagatatatgggagcaagaatacctgttttgtctctctccacacatcaagtttctcacctttaatatggggatgataataatagtgcttgatttatagagttgttaaaattagatatttcacaataaagcacatggcatagtctgtggtatataatcatcatttagaaaatacagcttttttttttttttaactaacacatagcaatatgatcacctttcttgatcatgctaatactaatgtgttcactttttttgttgtgtcgttttgttttgttttgagacagtctcctccctctgtcacccaggctagagtacagtggtgcagtctcaactcgctgcaacctctgcctcctgggttcaagtgattcttgtgcctccacctcctgagtaactggaactgcaggcatgcaccaccactcctgcttaatcttttttgtgtatttagtagagacagggttttgccatattggccaggctggtctcaaactcctggcttaagtgatctgcctgcctcagcctcccaaagtgctgggattataggcatgagccaccacacctggccctgtttctatttcttacaaattttaagcctcttgaaaatagaatgtatgatgaccatttttcccttcatacctagttcagtaatcagtaggtattaaatatatatacttttaactgtaaatgaataaaactgtatttttattctgagaatcaagtgagaaaggtgctttgacctaaatggtcactaaaatatttagtgtagtgacttgctttttaagtggatctaagaagtacagaaaataggattattctagtcaaaaagaatgtgaacctaattttttaatggttgggagaagtttttgtagaaatcatttcatgctttttaggtagaaaaggggctagacatggatcaaggaatcatataagaatagaaagagcttctgaaaagggacacacatatataagagatggtgaaaggaatttggatttagcatcccagtacctttagttggtgatatagcagtttagtagagggtaactgtaacacagtaacaaagacttttcagaaactcaatgtaaaagaaagaactgtagcagtggctcacgcctgtaatcccaacacttggggcgtctaaggcgggcagatcacctgaagtcaggagttgaagaccagcctggcaaacgtggtgaaatgccatctctactaaaaatacaaaaattagccaggtgtagtggtgcatgcctgtaatcccagctactcgggaggctgaggcaggtgaatcacttgaacccgggagacggaggttgcagtgagctaagtaaatgccattgcactccagccttagcgacagagcaaggctctgtctcataaataaataaatgaataaatgaaagaattttatattttgcactggtagaaattaaattagagatcagtcacatttgatttacctggagtttgggagatagaatgttttcagagttattttaagcatggtaattaaagagtttctttgggattttggttggattggaggagataacttaatgggatgaggcagaaaacagttaagagccattgtagattacagattaatggctttactgtagagccttaaattaatctgtggtttcaaactctcatccaagctttgtgtttcacagacttgttgagcccattaaagaaatggaagtctcgctatctgatggagcagaatgtcaccaagttacttcggcctctgtctccagtcacaccaccccctcccaattcaggctcaaagagtccccagctggccacacctggctcatctcacccaggagaagaggagtgtcgaaatggatacagcctcatgttttcaccagtcacatctcttactactgctagtcgctgcaacactcctctacagtttgaggtgatttgggtttggttgctgggagtgctggatatgaaaatcatcatttgtaccttctcatttcaaatataataccattccaaatgtttctttactatctttcttccccatctcagtaagagaatgggaaacctcagggtcattgtggcctgttacctggtagcctctcatcttggcagcccctatgcttcccaaaataggcatactgctaccacaaatcccattcatgtatcttttgcatgcagtccatcaatctccataagtttaggtagtaagcatgctagatctccatcgttatctttactgtatactttggtcaaaataggcctctagctgcctgtagtatctgttagtaacactagcctgagagcacagatgatattgattgattgtgtcttcgtttctaggcctttaaataagtgaagtgtctttcccaggttgtttggtattttcattgtggccttagcagagatttagaaaacattggggtatggcttatggcgaatgtgggttttttccactccaggttactttccctctttgttataatgtcttaggaatcagaagtagacaagaggctagcaacatgtattcatgagacaaatttattaccttcactgttggattaagttagaaatgtctgcctcagctgtttcaaaaagtaatcttgaatcactttagtgttcaggtttgggtgacagcaggtttcaatagaatccatgtatacttttttaaaacacttcatctattgcatgttactttgatttgtaattaaaatggacactgtctcttttttccttctcagaaaaatttgttctgaccactaaacacactctgctgctctgcccccttgtttgcacttctccagatgtgttttttgagaaaggtgaacattttaaccaatcttacgtttcctattcagcttttccaagtatgaggattcagaatacttagcttttatgagtaactaagaggcagctagcaacattgaaagcagaactgtattctttcttaccctagacctctacttttggagcagacctctttctgggtgagggaaaaaacctcctggttacatatcagttatctagggaaattactctttaccagattatttatgaaattctttcagccagataataaagcagctgattcaggcctttctaacttgactttgtctacttgcaattgactttgcagtttgcacctagagctttatagtaaggtatcatgagaggaattctccctggagggcataagattataggaatagagtgtcatactttatcaatacaggttttattataaatgtggaattatgaaaattagaaggaggccgggcgcagtggctcacacctataatcccatcactttgggaggctgaggcaggcggatcacgaggtcagtagatcaagaccatcctggctaacgtggtgaaaccccgtctctactaaaaatacaaaatattagccgggcgtggtagtgggcgcctgtagtcccagctactcgggaggctgaggcaggagaatggcgtgaacccgggaggcggagcttgcagtgagccgagatcgcgccattgcactccagcctgggcaacagagcaagactccgtctcaaaaaaaaaaaaaaaaaaaaaagaaaatcagaaggtaagtcactttgcaaaacaagcgggttcagtactcagtgtgttccttatcccttgtagcatttgggataactattaaacactgcaaatataaagtggttttggttttgttttgttttgttttttttaattggtgatcattttaataatacagtccatgcataatgttagaataccaggagggaaggaaaatattaaatagtaaaaggtccaaggcatggtttcacttgcaatttaaggaaattttacctttctcatcaataatagaacagatttcaccaccctgacccattctaatcaccattttaatggccatactctttgctgtattctagtacagagaggtggggagccttttttgtagcaaaggctgtgacacattgtgaaatatcaaaaaggtgtcacgtataaagaccagcttaggctgggcatggtggctcacacctgtaatcacagtgctttggaaggctgaggcaggaggattgcttgaggccaggggtttgagaccagcctgggtaacatcgtgagaccacatttctgcaaaaataaaatacaaaacttagccaggtgtagtggcatatacctgtagtcccagctacttgggaggctgaagcaggaagatcacttaagaccaggagtttaagactgcagtgagccattattgtgccactacatgccagcctgggcaacagtgagatcccatctctaaaaataatttaaagaccagcttaggccaggtacagtggcacacacctgtaatcccagctactcgggaggccaaggcaaaggaattgcttgagcctgggaggttgcagggagccaagactgcgccactgcattccacattccagcctgggcaacagagggagactctctctcaaaaaaaaaaaaaaaaaaaaaaaaacaaccttactagattagtttggggaaggatatttttgagaaggaaaaaagcattcaggaaaatggtgagaagtcttaagtgctaaggggaagaaggtaagaagataaacagtggaagagaacaagatcttcaggaggggaaagcatctagaaagaagagtggaagcaacattgggaggacaagcttagttagcctctcctttctaccagaataaccctcccctcctattcttgccctgagagccatactccacccgccatttcacacatacgtgcacctagatgtacaccacccactgtccatgccaagtaaaattcacagccaaaaccctgctttgctgaagcagcctcatttcccctacctcagcatgtgcctgccacctaggccacagttattcagagtctacattaggcaccctctccttacctcagccctagcacccctgagtcattgtcacactaccaccttcactctcttcacgtgttcccatttacatctttccattaagcactcactgctcagtctctgttatgggactgctgcctcacctgaaagtcccaaggtaaagtcctaccctctgtaggatacagggacctaagtatacacatacatgctttttctgctctgttgccaaaagtacaatggattttacaaaataacattaataggggtggctcaggtctaattagattatgccaagaaccaactctagcctgtgagctagggattccatcaatcacatttcctgtaactgtcattcaagaggaactggccatctccctaaccatgtcagcccccagcacactaatgtctccccctggatagcactgggagggcctgaggcatataagagaataaagaaatgtgacaagcagaagaggcattggatgaaggaacaaggtccatgtaaggaggaataaggggtagggtgcccctcaataacaaatactgtaggttgctaaactctcatctaaaatacaaagacgtataacactaaaatttcaccagtctaactctttccttgtatgtgcttgagatgtttacttacagcatgaaacattataaccaatttatccttaaatgctttcagagataccaggaagcattttaacaagtcattctgtccattgagatgagttctgcagttaaatatttcccctatgcattcttattcaacttccccgcccccgaaaaaagttatggctaacatctatgcttgcttttattttttgttttgttttgcttcttgacttcgagtagatgaataataacaagatgcttttccctcctctagaacatatcctcccctgagagttcccctgcgcataggcccgagtccctgtcacccgaggtagttatcacaccatctcaatcacacttggaggctgagagtgagtgttcatgaatgtgttcctgagtgtgtggggagggctggggatctgagtcagtggggtgatgggctggagggcggccactcagtcacagtaagttgaatgagtcttcctgtgtgactgtgactacacaggactgtcaatgtagatggaggaaaatgaaggtaggagcgtgtgtgtttgtgtgtgtgtgtgttgtgtgtgtgtttggtggggttggtttttgccgtttgggggagggggtggctggagttctattaaagaatagaatctagaagtcaagatgctgatatgtggtaggagccttgttaaagaaaggctaataaatcaggaaagttgagtcaaaagttgtaagagctgttttttgagttgggtggtgacttatgccttgttctagggttaatctaacagctctgtaaaccagatgttttgacctttggttgatagattgagcagcttcttcaggaagggaaagtcattctgtctttcagctttcctacattttctctgcagctccttactgggtgcacaaggaaaccaagtgagtccctggctttctgtcacaggccaccattctgcaatggttaggatatggttgctatacaagtgttatctctttaggatatcagtagagtggttttctcacaaaccctactgctgtggatatgtcaaactcagattttagtgctagagtttctattataagctttcagatttagtaacattaactctgaatctattaatacatgggaccttttttctcttgaagagaaagttagagtctctcagaaatagtcaactgaactttaaccctatccccttccaataaaaaattagggcataattcagtgacagtctactaagttctgaatcagtagtagttcacaggttaatatgaaactgaaaaaggttttattccactagtatattagagattttcttggtgttttgactctagcttgttaggaaagtaaagctctctctcctcagttgttaaagattctaagataacgtaatttgaagactgatatggtatggtatctggttttctggtaccattctttgtcggttagctgtagttgacctagtgttggaagtttggaggttatgataaccaaatagtaggtggggtttatttttggtacatttcagcatttcagaatctgcagtgatgagcattagtggtcttgtggtatgttgacgtacattagaggataaagaagaattgagtggccagaaagttgtatgagaaacacagcttctttaacagtgaaagtgagtgaagaactggttggttgatgtctttaatgccatcctcctttactgaaccagtaacttaagtacttgcctttccgtctaccttctccttcctccacctttttcccttccccccaccttccatcaatattaatttagaaattgataaccccggaagccagttatcttaagacaccagtctcatctttgttttgtgcatggggctaaggtaaattcctaattataccacttgtcccttagtgtagtacaaggtgactcagcaacctgatgaaaggctaagcaggcaaaatagtcacatttagccaattacctaattctaactttcccagtatttcccatccagaaagacttgaaagcaattttggaaaggccaggattctttagtactctggcccatgtacactgttgctacgtgggacttttacagaatataatggctttatctgctctacttccgtccctcttatctttccctgttcacctgtgtccctctcccctcctttctgccctttgactttttcctttctcccctaccccatgtctccgttgatttttattctttcagctttgtcaccgaaaagacctggatttggcaaaagtaggataccttgactccaacactaacagctgtgctgatagaccttccctactcaactcaggtcattctgacctggctcctcatccctccctcggacccacttctgagactggtttcccaagcagaagtggagatggacatcagaccctcgtgagaaactcagaccaggcatttcggacagagttcaacttgatgtatgcctactcccctttgaatgctatgcctcgagcagatggactgtatcgaggatctcctctagtgggggataggaagcctttacatttggatgggggatattgttcccctgcagaaggattttccagcagatatgaacatggcttaatgaaagacctctctcgtggatccttgtcacctggtggtgaaagggcctgtgaaggagtcccatctgccccccagaacccaccacagaggaaaaaagtaagtgtttcatgttatatcggcgaacttttcaagaatgttaaccaagtagtttagtagatattcataagtttctgctatgtgttccgcactactctcagacaagtgagacatagtctctgccaaatccagtgaaagacaggctgttttagtacaacttggtgaatgttgtaaatattcagcaaatgtaaatgcctgtatgtgccatatacttgctaggcaattgagaggttagaacagtgaaaaagaaattttacctattatttagtgtgtcccaagttcgaggcactgtattaagctctttaaatgtgttttatcctcacagtaagcctataagataggcaattttctattttgcacatgaggaaactaaggcaagttgagtaactttcccgtggtcacacagctagtaaatggaaggaccaggatactacccagtttgagagagaaggctggagtgagaggcagcaggttactgatttaactgaatctcaaacaataagtaggagtcagccaaccaacaattgagggtgaggtatgttacagtagagggagtagaacaggtaattaggtggcactccattggccaggcagcaggcatgcagtatggtgcaaacagttggatgttgttgtatcaggtggaaggccgggggagccaggaggaaagtgcagagagtgctgggctgggccaggccatagagagcttgctaatgggttgggactccacttccaagtaatgcctgatcaagaagtcacaaagccaaaaatatgcttttgtataagtggttctcaactaggggtgtttgagaatgagtaggagtgttttgaattgtcccagtgacttgcatttattgagcagggccagggatgctgaatgtcctgtataggggacagtcccatgtaatggccaaacatctgtagtatcctcattgaaatgaaacctagtggtttttttatattttcattataatgatattaccagaatttattaacttctttccaaaattatttctagaaaatgcatatgcaaaactgtctatatttttgttccatttggacagaaaaatgagaaccctaaggggatagaaggaggaggaaacattggcagataatttggattaagataataattgatttcgaagattgttgcgtgaacagcattgactaccagaaacaaacatgaaaacaatctttggatttctggttttataatatttactatgtgcaaaagtcatagaaattatgatattttatttcagaaacacttctgaaatttattgggcacatttaagcataaatttaagcatatgccaaattctgtgctggatgttaaagataaaaagccagataaacttggcctttgccttcctagaacttatagtttagtcagggagcaatcaaggcatggtaataggttctacggcctgtgtaagcaatgtgccagaacaacaaagagaaggtgtactaggcagggcacggattatggtgggcagggtgggatgggaggtctgctgtcaggaaagaatgagcaagcattagggagatgaaggggaagttagggagaagttaccaagttgttttctagagctagcttgctaaaattataaactggaaataataatttcctctctttttacattaattacatctatgtgtaagacagaaacagtaataaattcctatttatatcttgaaaatttgaacatatttaagtatcctggagcattgggtttttcttctgttttgttttgtttttccttctctctctccctctctctctccacctacctctccccacctccctctcctccatctccttctcctctccctgcttctttctctcaaacagctaactctaggggttcccaaggagtacagaacagccatcagtcacctgggaggctttttaaactatacaagcttccaattctcccttctctaggtacttccattgttgcaaataactgtgatagcatgcttctgttactgtgtaatggtaacctcacaagtttttctgaaggcagaaaaaaagatggtggtctaattggcaaacattctttagagacttgcctcctagtttattatcttcctcttaccaatttccagctgccttaaatatgtagctgtgctcagatctctttcatactccccaaaaaaagttatcagggttggtgtctgctttgtttgcgtggcttggctagtggtttactaaggtaccatctttccttctttccctgttgctggtgatccactaatgatatccagatagagtaccgttttttgtttgtttgttttttcctttctaggtatccctgctggagtaccgaaaacggaaacaagaagctaaggaaaattctgctggtgggggaggtgactctgcacagagcaaaagcaagtctgcaggagctgggcaaggcagcagtaactccgtttccgacactgg

SEQ ID NO: 348 - DNA, 32765 bp, Homo sapiens; identical to SEQ ID NO: 332
  source 1..32765: mol_type = genomic DNA

SEQ ID NO: 349 - DNA, 32765 bp, Homo sapiens
  source 1..32765: mol_type = genomic DNA
ctaactcgagtcctgccgcctcccgggagtgccgtgcgccgcagcccgggcccaggccccggcagcgcctgggacaaggtaagggtccgacagaaaagagaccgaacctcacgatcgggccccaggggagggaagggtcacctcctccgtctccccgcgctcgctctccttgggtcgtgggcctggccctccccaagctcttaggaggatgctgccacttctcacccccctcgccgccttgcacacaccgttgcaacaccccattttcccagggagagagatccccctctaatctaggcgacccaactccccctttcatgtttttcctgggtcaggacgcttcccctcccccaacgcctcttcaccccctttcctgggaactgcctactccacgtttacctttcccttgaggagaggcctcttgctgccctccgctcgaaatacacaggcatactttttttctctccccgatcccccactccctacccccgttctcgcggccttgtgacagacaactctgatcgctctgggggccgcgatctcccctccgtaatcttcctggacgccttccctctcgttttctggcttcccacctcagatggctgcttcccaaaggcattaccttcgccacccccaccacacgttctctggctccccgtggcgtgtgccacagcgtgtctgagatagcctcgttgaatgtgtagggttcgagcctggagttgagccagattgtgtcgttttacttgccttgggcgtggagaacgatcttgtgagaatatcttcaaaggcagaaaaatattccctttatgaattctctttccctctgcgtgtaagtcgggaatgtgaagaggagtgtaggaaagagccctggttcaagtaggtaaatcgcatgagagggaaagttaaactgttgggaaagccccttctatgctaattgattctatagagtccttgcttgtctcacttcttgggcgtcagtggtctttctcttggatatggatgctgcagtcagctctgctggtctgggtcaggggtgcgtgtatgacctgcattttctgctttctcatgttacttgtgcaatgtattcaccggtaactcatttctttcccagacctctgggttccactgggctttgtctatatttaagttcatttctccagtttccttcctgcacataggtactgaacgaatccccaagttctgtgctaattaccttcatcagttgactaaacaagtttttagatgacatatttgtgaccaaggtcatatttacatttctttgttggacagatgttacatagctatacttgtgattggggaggatccagctgagtggagtgtgctgagctttttaggagagtgtgtactccctatttgaaattattttttggttgttaattttatattattaatgtttttaggtcacagaaagttctaagtggtaattttagatgtgtgggatctgagctaggactaaagcagagaatacccacgtaatcagaggtttctgggctccatagaggacgtagggcttttttttttctattggatttcttccagttttctcaggatcattagttctcttctgtagccaaaaattctggcctgttatgggattagagtctttaaggtttactcagactgtcattatgtgtagaaaaatgaattatgccctttggtaggacatgacacaaggctctgtttctagctgcaaatttaaattagattgtagagtgcttgggaaattggctttcaaaagaccaaagcttaatcttcactcctaaactgctggcttaattaaaatggatatttagaatttggtaaatgttgatttttctaataaaaggccttggtttaaaagggtgaccttaggattgtttctttcttaaaagcataattccagcccttctggcatggagcactggtccaaaaaaaaaaaaaaaaagtgtgtgtaaggagtgggggtggggtaaagagaaggttgttcctttgggttggatcacaggggtgagtatacaaggcagcagcagctgctggctctggagctctggttgctacgtgagaagcttgagtagtgctggctgctgtctccagggaaggacagcagtgcagcgtccattaatgctgctggctgcagggagcagcacttaggcgatggctgcttcaggactaagaagaaaccttgcttttctgggaattttcactgctgagctggtttgctttttattggtggggagatgggaattagtaattcataatctcctacccatttatggatattggcatctggaaactggatcatggttaaagcctttctttttttgtttgtttgatttgatttttgttttttggcagatttttgttttttatctagacatttgtgcttggataggactaaaagttccattagagttttaatttttcaatcagtttaaaaacccaagtaataattttaagaatctttctgataaccacaataggaagaaaataacaggaattttttcctgcagctcacatatcatgccttcctccatctctttaatcatagaatcaattcttattattttgttatgtgtctccatcctttcgattagaccacatttaccttatagacgatttgctaaacattttactaagcttgaactcttaaactctaaaaaggtgccattttggagtggtttctaaataaatatttttaatttgtatattagtaataaacttctccagattagatattttctttggagtttgacttataagattgattcattatatacatgttggatatagccttctgacatcacaaatatatgtctttggccataatccatctgaaatgtaggacagaccagaagaaatatgcagaaatcgaataagtctagttcaggatactgagaagatggcctctgagccccttaggtgatctcccctcccccacaactcctgaacattaggatgatctctgattaagcaaaacagtctgagcgtggaaaaacttgaaggagaaccaccaccaccaattatatgcaatactggacatattcctgtgtgctgtttttcttccccaagactcgtgtatcctatacttttttctctcagaattttgatttgttcattttcgtgtaaatgtacttaaatctcacaaacatctataatttgtagtatcactctggcatttgtggcagagaaccaaaaagaatggaaatgagttttgtcattcacaaatgtggctcacattgttttcccagtaataaaagcagaccaatgaaacagaacctttaatggatactattttaggaggttccaattcttattactatcacatagataagatgcaatagcagataaatatgatttcatgtatactggctgtttgacatacttagggtttaagataaaaatgtttgtagttttttactctgtggcttaagttgctatataaaataattgcttttacactcgaatttcctgttgtttggaaccttttgtgctcttgatattatcattttttagaggatcatacaggcccttttcatagaaggatttacttaagttatacccttgaaaacttttttatatcttttgatactgttttgtgtccaggaactgactttctgaaattattctggcttttctggggagaatgactatttcatttttacctttgaatggggaaataataaagtgcaaagtacagatttgcagataattacttttgctttatcctctccatgttgaaataacttatgaaaaattaggccatagttaacagcagtcaatgactattggatacattttatcagaggggaactggatcatgaataaaataaaattttaaaaataatttttggctgaactctggtgattcatcagtttaatttgaagtcagaaggtctagcagtgaattttatttataaaaattgtatttcaagtgttgaaaactgaaacttcttgaccagtatattttgtttgaggcatcaaactttgcaaaatgtgcatcgtatatttagtgatataactggtagtcatttgtaatttaaagtattctttcaaaggcactctttagaaagtaatgtagtgtacccgtgatgggcagggattggtaccattccttactgccaaaaattccaaaatatgtggcaaaatgattgatttatcttgtgggtgggattctgggaagttcatgaaaggtggagagaatatagtttccttcacttgtctatatacattttgttaaataagtcttaggaaaactgttttattgtatctttaattatgaattgcgtaaaagatacccagtaactttggggggaggtgctgttagaaagcattacattggagagaattcccctaccctgggacaaaatgcattctgtctttaatacttagcgaagggaactatgggataaaataaacaatgaaggtaagctcagtctgctttatatgtgccctcactgagcaaggaatttgtaatcgcatcgtgcctcattcgtttataccatcatattgattttgtttgctgagtacctgagggaataccttacttaatgtaaggtcacattaagtatgtttgatatgaagacagggaaaggaattttctgcttcttggagtaatgtcttagtatttttaaaacacttaagtttttacatcaggccagttttgcctgatgctcatgtctgttgctttggttgggctgctgctttctcttctgtgttcttatgggttcgttgtggtataaggattcccacagctttcatggcagtatgaagtaatgagaagcattgccttagccatgttagttacatgtatacttttggcctatgttatgaatcacaaaaagcggtagctataggaatgtatacaaaatagatttctgtctggggaatcaagtttttgatttgtgctacctaatggaggggaaaatgctgaatttcttgctgctctgtttgagaaatagatggaagcatgggaggagccagagacctctgcagcaggatttggtctaagtagaaaaggaagatttttgtttcaaattgccagctgcttatgtcagactgactcccttattatgcctccagtaggcctgtcaatatggccaaacagctagataagtgcggggcaggacaaagggctctttgcacagcagggaggcaatgttggtgggggaggggcaggaggtaggaaaggcaagaggaggaggttcttttccctgggagattattcagtttggcatacaattaaagaaatcatttttagttcccactcaagcattgaatttttgccaaccacatactattaaccccaaatttgatacatttcagaatatcttgtagggatccattctcgccaaggaaaaataaaaaaataaataaagctctgtataggttaaaataaaataaatcccacactctgcaccctcctaggtgcaagtcacctcccgaggagacccgttctagagctgaattctcattaagaaatggaaaagaatactctatctgaataaaaacacattgtaatacaatgtgtttatttgggttgggattggacctgaacatgtagaataatttgtttccctttatgaaatagttgctcgtagttgtctacaattttatttcattaagataggtagcacattacagctttcatgtgttgggttgccatatgtaaaatgctaactgaagaaaggctactttttaatttcagcctcatccttagttcctggagaacctgatatttcctggagattactccctcccccaccttttagtttaggcaacctcttttgatacatttgtgttcagctcgcatacaagtgggatagttgcatccagtttattaagacttagtatgaatcatagagttggaaaagatctgttggttatctggtcctttaaaccaaaatcataatgaaatattttgaaatttgggtccctattgaagttttcattaaaatgttaaaggatcggtgttctgaacaacatttttagttacttttaaaataaatgttttgcgtcagttctttttttaaaaataaagaatttcatttataggcaaattagctggcaattatttgaattgtgataggatttctcttttatgaaggaatatatgacaaggtttttcaaaatgcttaatatattttaaaagactttaatttttagaaataattggtttgaacagttttccaagagcacatttgttgcttgggttgaggtaccacctatattgcaatgttactaaactagccttaaagttttcccttctgtctatactgcatgcaacaataaagggaactggaatgttaatttccatttatggattagcagaggagatgttttaaccgattaataaccaaaaaactgcctttcgtacacgtaatattaagcaagcctgaccaagttttgtgttatttctctctgttaaagaaaactggatgtgttactacttaacattatattgttatttaatggtcttggcagtaatgatataatatttcgaccaaaagaaattttgagtaattaattattattgtaattagttggaagtttctcatcagtaaaatagcaacagcattaacacaaaatctagtgagctatattttatattactacagaaatttagggtagtcatttctttctttataatttattcacatggattatttccataaatttgtgggactaaaatagaagccatctagtcaagcaccagtctccataccagacagttttctctgcatgtgctatgacccacattgccagtattaaacatcctttacaccctcccccttcccagataattagaaatctcttcagggtagcttccattgctcctattacctggatcttgctagaggctctaagaagttcctggtaaaagtgagacagtaagggaccacattttgattccaaaggttttgataactgttagggctccccaaacagctaatctcattttcaccaagacttagccagcagagggctggaatggaggtgaaacacaagcactgtacctcatcttgcctgtgcagctgctccaccttatttcctgctattattatctcacaacgcctcctcccatcaaaaagaaactaggacaaagggggaaaattggatgggctaatgtgatttttattatgctaggttgtgggcttgtttatatgtacttaaatacaaagctaatttgccccattcttaaaagtctttagtgatagagattttgtaacttctgtatcttctactttctttcttgataaaccatttcagattctcagccttacagaaagaaaggttttaagcatacttaattttcgttggccgttcacagtcattattaccaccagatgccactgtattattagcttgaagaaaggtgggctctcttctgtacataatatctgcaatttgttttggaaaatactaatttgtataaatctgatttatgactaaaataaggttaaaaattagacctctatgtatgtttaccctattaccttagtgggggtgaaattaattagctctttgaacataaatttttcatgtcttagagttcttttttcaagctgcataatttatgttcttcaagccatttttatcccataccacccccacaaagggggaaattttattttttatcatttttattgtctttcaatggtgagattttcgccaccccactcctgaaatgtgaagactcaaataaaactgagtaatctaataaggtatatgcgttgctgaatgtagtaagatgattgtttcatcattcttagatattatgatctagtttgaatctggtttccagtatcatgttagcatatttaatactgttgatatgttaattttaatacatgcccaggtggatctccttgctttctatttgtgccccttgtttgtcgttttgtatgaagggggtttttgttgttggattttcttccccatctctgtgtcctgttatgttctttggcttatgtttcaaaaattctgtttcctaccaccaacctctgtacatgccacaacacatacaatttgtactttcacagtttctgtgaagtaggatgatctgcagttaataatcaactgtttgggcattcttggtatccaaggaaggttttacttagaaggaagaacctggaaggacctgttggcaattagactacttctgcgtttattttacattttcccttattaacgtaggctgttgagagttgacttgttttataagagaaaccagattgacagagaagacccccaatcagatagagttattttaaaaataaatgtgtttattatggtaacatttggggtagaatctaaagggcatatttttaaaaaaacttttagttctaaagacaaaagagtttaacctaaaacagaacaaagagaagggcctttgaagcagtatgattgattatatgctgaatgtagcattagaatgttgtatgaaagcataaatttttattttctcaatttctatggtacaaactactatgcccatggaagtatgtgtttatgcccacagcctgaaatatattcggtggaatgccttaaaaaagaataaatctggccgggcgcggtggctcacgcctgtaatcccagctacttgggaggctgaggcaggagaatggcgtgaacccgggaggcggagcctgcagtgagccgagatcccgccactgcactccagcctgggcgacagagcgagactctgtctcaaaaaaaaaaaaaagaatagatctgaggaaaatgtaagagcaagtctaaaattttgaagtcctttttgaaatgctattttttcctagacaaatttagtgttatttgtggcaaatagaactttaatgtcgtaatttagtaatagaacaaaataagggtgggtttacatgtccctgcacattttaggatggagctaaaaattataatgtctgcataccaaattgttacacattttaatattggggcttttattgaaaaagtttacccaatatttagaaacctttaaaaacaaagtgacataaaatattcacagataaatcaggtagtcaccttattggtggcatattatgtaagtgtactaaagccagatatttagtgttaatccaaaaatatgaaaattatgctaacatcatatacagatctcagaagttgctgtagccagccaggcgtggcggctcacacttgtaatcccagcactttgtgaggccaaggcgggtggatcaccttaggtcaggtgtttgagaccagcctgaccaacatggtgaaatgccatttctactaaaaatacaaaaattacccgggcatggtggtgcgagcttgtaatcccagctacttgggaggctgaggcataagaattgcttgaccctgggaggcagaggttgcagtgagccaagatcgtgccactgcattccagcctgggagacagagcaagactgtgtctcaaataaataaaaaataaagaagttactgtagatgccactcttacttaaaccctaggccatgtgtggagtcccaggggaagacatgtatttttagagaaggaaggctctaggtaggtgtaaccttcctcttacagtttatcatgaacagttagtatgaaaaggaatggctggaagtttgcagtagtacaccgagcaacaagagaaataaacatatcccacttcatgaaatgactatgccagccaagggagatgaaaaacaattttttttatagtacacctcatttttttaaaaacactttaatactaggaatatgtttctgtggcaaatagttacccccaaaggattatgtcaaatatctcttgtgaaaattaattttaaaattaatcttttggctgggtgcggtggctcatgcctgtaaacccaacactttgggatgccaaggtgggcagatcacctgaggtctggagttcgagagcagcctgaccaacatggagaaaccccatctctactgaaaatagaaaattagctgggcgtggtggcgcatgcctataatcccagctactcgggaggctgaggcaggagaatcgctcgaacccaggtggcagaaattgcagtgagctgagattgcgccattgtattccagcctgggcaacaagagcaaaactatgtctcaaaaaaaaaaaattaatcttgtgtagatagtgaccacgttttactttccttgggacagtcctggtttatacctgctatcctagcgtaattagtaatagcacccgtttcactctcaaaaatgtctcaatttggatcataaattatacgcttaccataattgtagaggattgtgagacttttagtcgctacctagcaacctagtttttcttgatagagctcttcttattctggagtctcctgtgctgcgatttatctgttgacctctctgaacccccatttccaaatgagcagtttttcgaatgtcttttttcttttcccattaggtggtagtaagggaaggagtaggtatagatttgattaattttttaattttttattattaaaaactccaattactacaaaatagaaaaatactttggagtttattaaactgttagtttaaaaggttccatttgatcaggataaggtccataccttgattggtaagtttgagtctttatagattctgttttttccatgtaggattcttgttaaagaaattcattattttgtggagttcgtactctggattttgaaggttggataatcatttaacacattcctctattaaacaacctccccccacctgtatttcatgtaaattactgcttagatagattgtaagcatattttataatagtactgtgtatttccattaagagttacataatttctgcttgtctgtgtaatgttaagcagctgttgttattcattgcctagatcaaactttgtggtcttaaaaattgaagacctggaagagcttttgtttgtgtgaattatgtcaagatttaccatattagaaactaaaactgagaaaaattttaagttatttattaatattaaaataacagtaataaagcctgctaatacaagtaatgtgattttttaataaaaataacatttttaattttataagtgtcgtttgacatttttgcaaatctctttaatgtctgacttaatagaagacagctgctttctcataactccttctgcatttaatttcttgtgataagttgttttggttgaagactgaagaaaatctggccttgtacagataattggttggaaaatggaagacctcatataaccctctgacagaatctagaggacttcaggcattctcacaccaccctttttgagaatcactggcctatattcatgatttacttcatattagatgatattttcttacttcttcatttattgtccggaatactcacccttatttttatttggctatactaagatagtttatatacagaaggtaagataagcacttgggttttttacccccttatttactagttttcaaaataatgggttggtaacttagcaacatctaaagacgtgaatgaagtattattattgtgtactcatggttttaaacatgtttgatatgttacagtctctggcagttactatttttgacattcaggttgtcctacctttgtctgttggctactaaattcttttgattcattcttaatactttcctcacttgtttccttgcttcctactattactagatgttctaggataattttgtacattttttgccccaaacctggaatcagccatttctgcagaaacctcttcattcttttaatgaaaaatggtacttagaaaccacagtatggatggtaggagtgttcattgctcttggtttgggccttgtttctagatttttcaatgaacaaagtttaaaagtattttatttctttttaaaaatatcacttggtattttaaaagctgcatttcaaactcagtgctacatgatgtttacgtaaacctaatctttctccctttccccatgcccaaaatctcagttttcactaacaccaatgtaatttctctttgttttgtgccacaatacacacactacagttttagtgtgacagaacaatatgattactggaaagtggctttttgttttgttttctcatgtctttttgcccttagggtatatccctttagagatagagatagtcatgcctcacttgatgaggatattttctgagaaatgtgttgtcaggtgatttcgtcattgtgtgaacatctagaatgtactaacataaacctagatggtacacctaagctatatggtatagcccattgctcttaggctacaaatctgtgcagcatgtgaccactggatactatacgcagttgtaacacagtggtaagcatttgtgtatctgaaaatggaaaagataaagtaaacatacggtataaaagataaaaaatggtacacctttgtagggcagctccattacagtcttatgggatcattatcatatgtggtccatccttgactgaaatgtcgttatgtggcacatgaccatatatagtcagattacagtattttgaaatcccccttagaatagttctctatggttgtgccaccagtttgatacacagtgaggttaatttgttacattttactttcagatttttcagggattaggttttgttttatgattatgtaaaatacttaaatggttaataagtgaaatttacgaagctgggtataatcagaaaaattgagcttctatcctagtgtcttccagctggttctctccctgtccctgtatgttagactcaacagagtcatcatgaattttcagagtgatgttttgtcgatacttccccttttagcagaagaagcatttaggttagttcatttactaaaactatttccttctagatttttcactaactaatatttttacactgtagaagaggaatgtggaaatttctgttctttcttttttggaaccagaatttcttggcttaatacaagcagtttgagataagaaactttctccagtaaaaattctctttttttttttcttttttttcttttttttgagatggagtctcgctctgtttcgcaggctggagtgcagtggcatgatctcagctcactgcaacctaggcgtcccaggttgaagcaattctcctgtctcagcctcccaagtagctgggactacaggtgcctgccaccacgcccagctaatttttatatttttagtagagacagggtttcaccttgttgttcaggctggtcttgaactcctaacttcaggtgagccaccgcacctggccaaaattctctctcttgaaatgccagaccatgtttgtctctgggaatttcaggtacacttgggacactggtgctacttgaagtgtagagagctcatcagttaacatttcttgaatggtttgcccttagacctgaaatgtatgttatttagaaaggatgtcatatattttttaactttgtcatttaaaatccaagttatttgattttatgtgttttaaataaaatattaaaactttaaaagtcttgtacctgttaaatgttttatccttcctaattacagtatcttaaagttatcacatttcagcaatacgtcactttctaatgactaatatagtctttaaaaatactaaatcaagatataccaaaggtgaagaaatagtgattaagaatgtgaggattctagctgtggttttcttgctttggctttggccaagatgagtttaattctttggtctaataggaataatacttttctcctaaacattatgagcattatttgagttaatgcatgaaaagtggttaaaggaacagtggctggtgcaacataagcatccagtaaatgctgcctttattttggaagtggttattgttacgagtatttgatcagttctctaaactctgtctgaactttacttagaattagtaatgttcatatgctgtaaataacacctgattttcaatacttcattggttatatgaaaagaaccaactgttaacaaaggaataattggtatctagttaaaatttgaggcctctgacttcacaagtataccagtgcttactatataaatataatcacatttaaaaatttaataaagaaagttttaaggaagtaagtctccttttcaggatccagggtcctttacaaacactggatcctgaaattgtattatttgttgtggctttagggtattgtgtatgctgaccagagtcacaggtggtttttttgtttgtttaacactagaattttgagatacatttgtctttacatgccctcaaagtaagttatataacaccagattgttcattagttcaggtttgatttttttgttgttgttttttgtttttctttttaatactctggggttggagtgaggttgtagagtgctataaggaattcctattagaagatagtattttagatatgggcattctaggaaaggacaaaatggtacactaaagttatcttcccttttcccccaccaccaaaaaaataaggagcaaactacagtgcacagttttgggttttttttttttttttttttttttttttttaaagagacaaggtcctactctgtcgcccaggctagagtgcagtagcacaatcattgttcattgtaaccttgaaccactgggctcaagcagtcctcccacctcaacctccagtgtagctaggactacaggtatgtgctaccacacccagctaattttttaaaaaatatcttgtacaggtgggggtctcactgtgttgcccaggctggtcttgattgaactcctggcctcaagtggtctcatacctcagcctcccaaagctctgggtttacaggcataagccatcaggcccagcccacattttgttttttaaacaagtctttatcttttggagatacatgctgaaatatttatggatgaaatgaaatgttatctggggtttgctttagatagagaggagataatagatgaaacaatcaacttattagttggtcattgtcgatactagataatgaataaatggacttctttataccattttactttcatactttatttgaaacaaggtcttgctatgttgcccagctggccttgaactcctggcctcaagagattctcatgcctcagcctcccagagctttgggattacaggcatgaaccaccatgcccagcccataatagaaagttttaaattttaaaataaaagtattcatagacttggctatcatggatcctggtaaagtagactagtgaacataatcagatgtttcagtctttccctgttgatactgcttgccctctgagcccatttcctctcctgatcatcgcctgctatttccaatcaacagaaaaaatagagtagcctacatatataatgagtttatactaagagggaaattttaatattataaagaagtctatacagattctggagagcattcctgaagagaagattgaggaagcaaatggattaattaatgtaatagtgtgttcagtgtgcaataggtaacattttatgatatggttgaatttctgaaaaggtatcttataaatatcagaccatatttaaggagacttccacctctactgataaaatctgcccttctctctccccctgactttattgctgcccatctgtagttttgatcttttttctctaggattctttgcctagaattgccatgggccttctggatctggaacacggatgaaggaagaggatgaatgtttttcagatgttatcccttatgggagtaatttgtaaattctagcttcttcgggtggggggaggcggggtgtgtgtgtgtgtgtgtgtgtgtgtgtgtgtgtgtattatttatttatttttttaagttaattggcctcttccagcaaagagtatacagcagagacctagaagtttcattttttgtttgtttttgttttgttttgttttgtttttgagacggagtctggctctgtcacccaggctggagtgcaatggtgtgatctcttctcactgcaacctctgcctcccgggttcaagcaattttcctacctcagcctcccaagtagctgggactgcaggcgcgcgccaccacgcccagctaatttttgtatttttagtagagatggggtttcaccattttggccaggatggtttccaactcttgacctcgtgatctgccaccttggcctcccaaagtgctggaattacaggtgtgagccacggctcctggccaagacctagaagttttacgtcaaattttgtctctgcagttttctgaggaatgagtatatgtgctcaaataatagctaagtattaagtctgaaatattctagaaaaacagtcacaaagtagttatgcctaggatgtttttgaatattggtactagaacaaatggattcctactagatttcctttttactttcatattcagatgtaggaagagttggaattcaaaatgtgaaaagcagtcttgaatctcagtaaattcttaagaaattcttaattcattgaagagccattggtcgtgtgtgttttttggggagtgtgtgtgtgtgttgttgttgttaagaattcggggatgagtatgaggctatcattgcttctacaaggcaacttaatgatagtttgctgcttggcacaacaggtgaaagggcctttctagagcagggatcttggtttccctttttcccacctagtagtatcattccatgtatttaccaggatatacattgtttagtcctgtcttggctaaataggtaatggtccttaaggacataaaatggaaggatattgtgcagaagaattactagttctccgtagtgtatttttttactgtattctcctcatcaacagatggaaaatttttaaacttagaagaaaaaacaagtgtttttctccaaaagattgagaaccactgcttttaagttattaatggaggtcttcaatggatttgttaaaaatctggagcatggattttttttttttaatttttttgttattggttactgagtattggaaaaggaaatacagtattcaaaaacagtaatgttcaggatttggaactattttactcaggaaaaaataagtttataaatagacattttaatgaaaaggaaaatagcaaatttatggaaatctgagatagtctgtgttttgcttcactctgtttagtgctagaattctggactttgtttggggtcaaactctgatatgacaggaaaactaacagatgattaaaagagacagtaacataaatgggaaagtttaaatatggtatatggttttaattatattttgtataagaaagcagtttataccagttgtattcctaactaaaaagtactattttatcagtttcctgggactaatttattataagttaattaatgacatgagcattttggcccaaatacagttgaaatgttcattgaaactggatcaaagatgagcatatgtgtcaaggctttaaaatcatttttcatattaagatttccagagaaagtttttgtaatatataagttaaatatttttaatgctttagatgacaggaactgttgaaggtcctggatctcataacaagccactagctagctgatccaaagacatttggccccatgggcttctaggaagacaaatgtgcttaccatttcaaagattttattttgctcagtaacctactagacatatattagtgtttgtttgagttggtcgttgtcttccattgctgttattttattattattatttttttaattttagagacaggatctccttgtcacccaggctggagtgcagtggcacagtcatagctcactgcagtctcaactcttaattaggctcaagggatcgggatcctcccacctcagcctcttaaatagcttggactacaggtatgcaccaccactcctggctgtcttattgtgttgcccagggtggcctcaaaactcctggcctcaagtgattctcctaagtcagcctcccaaagcgctaggatacaggtgtgagccaccctgcccagccccattgctgttgaacttttttttttttttaaagacaggctctggttctgttgcccaggctggagtgcagcagcgcaatctcagttcactgcaagccacccaccgagctcaagccatcctcccacctcagcctcctgagtagctgggactataggtgtgcaccaccatgcctggctactttctttgtaatttttttgtggttcaaataggaatcttccacgtgcatccaaaatatttttggtttgtgacactcagtgttattattgactcatttttccattggaaggtgtgcctcagagtgggtgagcctttttgccctcagtcttctgtcagcactctaagactccaagtactctaagagattgctcactaaaaataagaacagctggccatctacctcaaatgtgagccgtcacttttgtgatataatcagtccttatctttagtacacagatttatggaatatcacactcactgtctgcctgctttggggtgtttctcctgtgtcattcatttttgtatattggcatatagcaaatataggaatgctgtgtcgcagctgtgggtcatgtatgtacttgcagttagctcttgctcccaagaatgcaagaaatttatcaacaaactcgtgtcataaaaatagtttacagtgatttttttcttaaaatatttcaatgattaagactttttttaataaccacaagtgtataattgtaaaacctaagcattactcagcaaatctagcaattgttgaattgcataagcttcttgttcattggaacttttgctaaagaattatgacctttgatttcttatcaccatgacctatcattatgataaacatgcccctcttatgtatccttatacccattataaggataaacaagggatagctccacccaccagatgtcatagacacaactggtattttggggattttgctgtagactaatcctggaaggaagagaggttatagataaaataagattggccatgaattgattgttgattaaagctgggtagggaacattgggttttctctggttttatatttatttgaagtttttcaccataaagttttttttttttaagataaaaaataaaagcatgaatagtgtaaacaaagttttgaaggagaaggaaacaggttagtagctaattaacaaaaatgttcttgttccattcaggcacaggagtttggactagcccaataagcattaaggaaaccattatttgtagatttcagataatgcaatgatagtaaccaaagttatgctctagaagggataacatcatggaagaatatagagtagattggagggttcacaccccagaggtagtgagaccagttcactgctattatataatgctaccttgaaatcatagggaggcgactgatgtggtttgctaaaagtctccaaaaatttcaaaggagaatagctcttcagtcaggtgctagtgccagcacaacaaaaaagagggttttttccctcatttggccagggcatggatttggaccatgtgggtgtcataatggagtataccaagtgattttgttcctatgatgaaagtgaagtccatattttgtctcctgtcttttagtaaatcagtatagataagtcttttttttttttttccccccgagacggagtctcgctctatcgcccaggctggagtgcagtggcgtgatctccactcactgcgagctccgcctcccgggttcacgccattctcctgcctcagcctcccaagtagctgagactacaggcgcccaccaccatgcccagctaatttttcgtatttttagtagagacggggtttcaccatgttagccaggatggtctcgatctcctgacctcgtgatccgcccgcctcggcctcccaaagtgctgggattataggcgggatccactgcgcctggccaagtctttttttttttttaattattttattctttatttttttccccacatattctaaaataagtctcttacagtgtctaggtttctttccaaaggtgattaaaaatgaagcatcatattttaaacttctgaggcagaactgctagaacaagagttttgttttttttttttttttgagacggagtcttgctctgtcgcacaggctggagtgcagtggcgcgatctcggctcactgcaggctccgcctcccgggttcacgccattctcctgcctcagcctcccgaatagctgggactacaggcgcctgccaccgctcccggctaattttttttttttttgtatttttagtagagacggagtttcaccgtgttagccacgatggtctcgatctcctgaccttgtgatcctcccgcctcggcttcccaaagtgctagaacagagttttgataatttgtttgaaacgaagcactcaaatcttctagtttatttgcatttgcagtcagacctctacagatgccagctagattacagatggctagcataagtttttttcattacagaaagaagaaatttagagcttagtgcggtctattaaaagaattaaaggttatgtcaaaggacaactataagaaagtactttggttctgaatattgcttcagctagggtttattttgaagctcctagcccaaatttgtagaaatgcaactaagatctaatatttagtgtgtaagaactttacaggacatccagtcagtagtagtcttaaaagtgaatcacataggctgaagcaggcagatcacctgagcccaggagttcaagaccaccctggccaacatggtgaaaccccgtctctactaaaaatacaataatcagctgggtgtggtggtgggcacctataatcccagctactcaggaggctgagacaagagaattgcttgaacccgggaggtggaggttgcagtgagctgagatcctgccattgcactccagcctgagcaacaagagcgaaactccgtctcaaaaaaaaaaaaatgtgaatcacatacataaacattgggaatttgcagataactttcattttagggtttctagagcgcagtggtgtaatcttggctcactgcaacctccacctcctggattcaagcgattctcctgcctcagcctcccaagtagctgggattacaggtgtccaccactatgcctggctgatttttgtatttttagtagagacggggtttcatcatcttggccaggctggtctcaaactcctgacctcaggtgatccacccgccttggcctcccaaagtgctgggattgcaggcatgagccaccacacccggcccacttacaggatttttctcccccttcatggttgtataaatgcagtacttggcacataggcaaacctgaacagtttgcaagttgcctacccttttctactttggataaaataaacctcttaaaatagcacttaacatagtaatatatgtatattaatagtagttacttcatgtttgttgaatgaatgaatgaaaaaagtagcaaatctacataatataaatcccaagacagccaggaattttatctggacctaattgtcttacatagcaccaattggtacttaataaaaacaaggctgggcatggcagtatgcgtctgtggtcccagctacttgggaggctaaggtgagaggatcgcttgagcccaggaggttgaggttgcggtgagctgtgattgcaccaaagcactccaacctgagtgacagaccctgtctcaaaaataaaaataaaaacaattagttataactcagatgttgctatctaaggtaagtagtaattactataataaacaagctatatattaacatcttaattttctttcctctgaactttactactgtaggtgtgtagtgaacttcatacaagttaatctttttgtagctctatttcttcatttctgtttgttcatcggttggagaaattttgcttaaattaatgaaagtaaaaatacagatattaatggctcataaatgtgcacaacccacttcatctatagtaagtaaaagtggctcccattttggggtttgaaaatgaagaagatctgaattcacagagaggaggcacgtgtagagatatgagaagttcttttcctactctactttggtacattggtctctaacacatgttctgagcctcagaacacagtagaacagaaccttcagaaagtgttgagagtataactctttaaagaggtttagtcagtctaaattatttgagggcatcatctttatttggtacttagaagtctaaaatcttcctgattgttgttaaggttacaaagagtctgtgtattgttggttagttgagcagtaaatacctttttatcattgttaaatgggttgtaaataaaatatttttcttcagtgttaaaataatttatgatcacaatatttagataataataataataattctgttatttatgatatgtagtcttatcctactgccactcccctcttctgctccacatactactaagtatgacttggtctctataatacgcactaattatgaagttttttacggagaaggaaattcttaatatagactaggattttttttcagttgtcttttaatggccttttattctagtaaacttagatttcttatagacatcggtttattgtgccgagctcagtagctcctagagggagtataaatttaggcaaaggaatcaaggaataaactggtattgtagaagagatgggagaaaaggaaatttttatttttgctttaaattactaaatcatgatgtttcctgtctctcagtgcttaccccaatcagtgtttctctcttttcttttttcctttcagtcccgaacccctaaaattctttgcttgcattaacttgcttcagattataagcctaattttactgttccaaatacatgaacttttcactgtatctccaagtgctcttttagagttcatctctttgttttccagtaactcatatttgtttcttcttatgcttaacacttctctctcatttttttttttcatgtttctcacattttttctttccacattatctgctgtagcaaacttgaaatatatgcttttggagaagagtaaaaacagtgtttagccatattcaggttattagcagcagctcctctttcttcacatatacttaaagggaccagaaagttatttaagctcttacttgctacaaatgctgttccatgtgctcctatgagtcagcacaacaggtattttttttttttttattgtacagatgagaaaactgagactttgagacattctatgaattgcctgagctagttggcagcagtgccaggattcatagaaatttggagcaggaagacaacacaatgaagattttactttgaggaatttagggttcatctatgtaaagtgatttttctgaggtcactaattatgttgtaggctagaactcaagtctcctaactcctaatatagtgccttttttttcttttctttttttatttttttaggagatgggtctcactatgttgcccaggctggtcttaaactcctgggctcaagcaatcctcctgcctcagcctcccaaagtgctaggattacaggtgcaagccaccgcacctggcctctaagagtgctttttcctagcatacttttcttctcctaaggtaaaaggctgtttgtcatggtacagctacggtgattttacttgagatatttgactttgagatggagatgaagataagtatataatgcagctgccacattcattctcatacaaggtaaagtcattcaaaagataaatcgaagaactatagatgtatttaagaagaaattcagcctatatgtaacaacaaaattttgaataatcaagttcagaaattggatttttaaaaacttattagctactttaacccttttgaaatattcccaaaaagtgttttctcttcctgagttaaatttattcatttattgacctattaaagatttttttagtgcttcagagctattctgtatatctgttcattttcgttatttagtagtatatagaagtaatagattgggctgaatagatttatttcaggatatatcttagatatttgtgttttttcatgaatcccagtttaagggttattgctttcaaaaggaagaaatttggttagtcatgacttttggctagttgaagtttagagaagtgctttatacaggatcttttatttagtgagaaaaaaataactttttataattttataatactgtgtgaaaaacctgataccaaaacttctgaaaaagaaaccaggcctaggagatgaggattctagggaagattattaaattgaggatatttttaagttagattctaaattagtaaatcgtggctaataagatgaaaataatctgatcctttagtaagatctgaagtaatattgttgccctgcaaaaaagtggttgttatcagcataccttatatgtcagcctaagcaagattagattttctcttttctctgatagatgccaatatttaacattgacttttatctactttcaaaaatatctatgaaatatactttctgtctctgaattagagtgtatgtatatttgtgtttacttgaaatgttatagctggatgatagatttcagagcagtttttatgcttagggaagccactgcctcccaaaaaggttttcttatgagaatgaggaaaataagtataaattttcatatttatgttattactattgatgtgcttggataattgtatttataaaagtaaaaaatgttcagtattttatctgaaatttaataatggatattgtacagcctaaggaattaaaagaaaaaggaccctttgagaaaatggcttgttcttatgtatcttaatatatactgtgttcactttatgttttgtcagacactgaaattgaggaagagagattttggcgttctgttggtttatggagagagttgatcagagattgctccttggctgagttgctgtctgcataggctgttaacaattgtttctctggcagcagatcttgttcatcaggattgcatcatttctgggagaatggccaaggtccacagcctcaatacaaagactgtctgaagcatatgaggcctgttctctttctgaagcggcactcctcttcctgccagtcctcttcacaggattactgaagcagacttgttctgaatttctttcgttggattggttgtttattggacttttgtctgccagctgcttccgcctcacctgtctgatgcaatttcttcttctgaaatctgttggaattgttcataaaacactttttgtttgtcttctctgtgagtgaccagggagatcatacaggtcttgtgctttcagcaagtcatatagagaagagactgtcagaatgatgatacagagactgttggccatttctgaaaccaattaaaaagatggggtaattaagaaacatttctggcatgttctatttaacatccttttccctagaaactgtatgtaaatggcacctcctaaagagagtactcggtactactggaagatacaggctgtgtctgtttctgaatccaagaacttactagtgttcctgtggattctgatggattgttctggaaatagttaaattaataataaattgaaactgtgatgcattcatttaccccctactgtacactcacatctatttcgctgttttcctcctttcctttttttctttcttatttgctattgcttcttccttgatttactttatttcttccttccttttactgttactttgatacttttatttctctaattctgggtgtactattttaaatcgtttctaaaaaatagtttattttccagttttttaaaattagaaatcataaaacatcaacataaatgaaatgcatgcgttctaatgcttggtaactggaatcctatgaatagctcttttcatgtttatgatatgttaatctttaaggtgttaataactctggctagcgttaaatttgacttttaggaaaaaacaccagagacttaaaggatactgatcattttcccttcctttttggaaggtagaaaattaatttaagcgccattttttaagcatgtttccatttgaccgcaaatagaactgactcctttttatcactcttttttatagtaggacaagaaactagatggtgtggaatgaagggaaagaaaggagtaataaatatggacttgtaatttaatgggtgatgatggccccttgtctggctggacagttgtcggacatcgggttaaagaaagaactctgaatttgagaagtgttcagtgaagaagggaagcaccttttaggagagagaaaaagaagggatcccttggaaaatgagataattctaatttgaaggaagaggaaaaattagccagtgacataagtatttaccatttaagtcaaataatttccttctctaccatctcgtttctggctttatggaaaaataaaaaattaaagggcaaaaaattcagtgccggatggacgtagggtggtaaacgagatagtatagatgtaggatgataaacaagacagtatacagaaacataatatagctgtagaattccattctgtgtgttcatcaatgttatttctttctgtactaatttttgtctcaactttttctaggtcttcagaactactagcagataatttggggggacttcatattcagaagtctatataaaggtgactgacccaagtaaatccttttaatttctgttttattttttgcattttaatgactgctggaatcatgttgtagtaaattgtgattataatttacttagcagatatttctggaacttctctacgtgtcagttattgttttggccattgaaactacagcagtggataaaaatccctgttctcatagagtttatattctggtaggaaaaaacaaacaaattataataagaaaatactgcatttagatgatctgttaaatgttcctcggttaacattttaatagctacattttacagagttacttagggaaggaactattcttagggtaatatttgagaaatttgggattattaacagaatttgaattaagaagcctcatcattattaaagcattagttagaatgagatggtcaagctaacctattatggttgctttcatcagaagaatgaaacagtcatgttaaactagacacaaggaaaatggaataatttttatgaaatagaaatttatagttaccgacaatgtttctttttttttttttttttttttttgagacagagtatcattcttgttgtccatgttgaagtgcaatggtacagtcttgactcactgcaacctccggctcccgggttcaagcgattctcttgcctcagcctcccaagtagctgggattacaggcgtccgccatcgtgcccggctaatttttttgtatttttagtagagacagggtttcaccgtgttagccaggctggtcttaaactcctgacctcaggtgatccgcccacctcagcctcccaaagtgttggaattacaagcgtgagccactgcaccgggctgacttaatgtttcttaaggattcatcaactatccaaaatagctgggttggtgtttcattagtgaatgtagcaatcatttattcactcattaagatgttatctgaagtaacttttccatcttttccttttagtatatcttttaaaaattgctctaggaaaaatatcaactatcatcttgggtttataacttgtcttttatctagaaactgtactttttttttttttttttttggagaaagagtttcacttttgctcaggctggagtgcagtggccctgtctcagctcactgcagtctctgcttcccagattcaaacgattctcgtgcctcagcctcccaagtagctgggatcacaggcatatgccaacatgcccagctaatttttgtatttttagtagagatagggtttcaccgtgaaaccatgcattttttaaatgggtgtacagtcgtaatggctacaacaaagggtttttaatgatattaagtacggtttttggtttaagtcttttactgaaaatataaaacaattcagattccctttgctgatcaggggaggtacggtgataatcagactttcatatgattatctggtcagacagctttggggcttttcttttaatctgaattatacagtaagactaatagaaagagtagtgaccaacagcccccagtatttaactgtcttttgggtttacttgatgagtgttcttgttttatcatttacagattttacttcaatttcccaaaggcttagaagatgtactgccaaggtctctgtttggatatactgttagggaaaggaaacatacatgtgtaagactggcctaaaggcaaaaaagttcatcagtccctttttttttttttttttttttttttttttttttttttttggcaacagggactcactttgttgcccaggctgagtgcagtggcatgatctcagctcactgcaacctccacctcccaggctcaagcaatcctcccacctcagcctcttgagttagctgggactacaggtgcatgccaccacaccagatttattttttttttttgagatggagtctcactctgtcgcccaagctggagtgcagtggcgtgatctcggctcactgcaacctccacctcctgggttcaagagattctcctgcctcagcctcctgagtagctgggattaccagcgtgtgccactacagctaatttttgtgtttttagtagagaaggggtttcaccacattggccaggctggtctcgaattcctgacctcaagtgatccacccaccttggcctcccaaaatgctgggattacaggtgtgagccaccgcgcctggcgcacaccaggtaaattttgtatttttagtagagacaggatctcgccatgtttcccaggctggtctcgaactcccaagctcaagcaatccacctgcctcagcctcccaaagtgctgggatgacaggaatgagccacttcatctggcccagtcatttcccagcccagctatatgtcacctccaattgggtgtaggaacaggcgtattgtcatacccagaggtctcacttcatcatctaggctggagtgcagtgcatgattatggctcacctcagcctctacctcctgtgctcaggtgatcctcccacctcagctcccaagtagctgggaccacaggcacacatcaccatggctggctgatatttttttactatttttgtagagttggggtctcactatgttgtctcagctggtctcaaattcctggactcaagtgatccttccaccttggcctcctaaagtgttggtattacagttgtgaaccactgcacccagcccacaattttttttatttgcattaatatcaaagtaagattggagcatctcagaccatctaccatttacaatttacattaaccggccaggcacggtggctcacgcctatagtcctagcactttgagaggctgaggtgtgagtggatcaccggaggtcaggagttcaagaccgcctggccaacatagtgaaacttcatctctactaaaagtacaaaaattagccagacatggtggcaggcgcctgtaatcctaactacttgggaagctgaggcaggagaatctcttgaagccaggaggcggaggttgtagtgagccaagattgcgccattacacttcagtctgggcaacaaaagtgaaactgtctcaaaaaataaaaataaaatttacattaaccccctgggttgactcagtcggtatcatgtacttttcattcctttagtttttttagtattaataattgttctaatgtcttattatgaatcagtgtatcagtcatgactctctttgtagtcttttttgcaaaagtccttgttaacatgggtctttgacattcacattgactttattcccccccaaataaaatgctttttgtttcatcctttcaatgttttttacactactgtaaaactactaatgtaaagtcacacaaagaacacttgtttccctctgcaccatacctccaaatctcttaatctatttttgcatttttttatacttcagtaatttctgagtctttctgttcccagctttcactggtttatggtcaccatgtcaagctatcctcaccgctttttcatacacagttgtttagtctttatcatgaaactgtactcttcgtgatttcgggggtttttttgttgtttttaaaaagtagtcaacttttttagagcagttttaggttcacaggaaaattcatcaggagatacagagatttcccatgcaccctctgcacccacgcatgcatagcctcctcctggtttatatttttgttcatatctagcagcgtattattaccccacaaataaagttgctaagatgattgcatcttctcccaaaattatagttaagatgatttaaaagaaggaagagagtgttcaatgacaaaagaaggcactaagaaacagctgtttccaatcaagtataaacaacaaattgatctcttttaatttggaagaaataacattattgactgcttgtgaaactgcatttatttgtggcctaggaaaaaaacttaaatgaagatcttgaatttttaaagagtttaggtaaactgggatatttttaataaccatcctttatcttaaaacttgtttgctatatcctaggctgccagaaaattttgtttgggcagttttagaatggggagaatgtgttggttagtgagataggcagactcttcctttcccttcaactgaaaagaaaaacaaaagtaaacataactttttgccccctactttgtgaaacattaatgaaatgcatagtaaacatgggacactgtggctgtatttattttataattatcccttaaaagccttattcaagaatgcagaaaaatattcagtaacatttaagataaacttgaagaactatctgataactaggtatttattttactagatattttccttttctgttacaggattcctcatgtccataacatgttggatgaggctctgcagctcacccccactctcagagtggtcagtctccattaattggaccccgtgatttccaatctctgctgtgttggacgtcatgagcattgcaatccctctgggagtcaccacatcagatacatcctactcagatatggctgctggatcagagtaagtgctactttctaggtagtaggtacattatcagtctgtgtggagacagccttcttatggatagctaataggataatatgtagtattttcttaaccagatcctattccactgtaattaacattagacctttccctttacccccattgaaggtggtggaaaaaaggaattagaaggggaaggaagagttttcagaggggtatttctgggcaaataattaatagaaccaaagttgcaaagtaggaattcattttcatttgttttaatgggtggagaaaattggaataaagtaggtgttactacctgcttctgtagagttaatgattctgatggagggagataagaaggtgttctttccaactgattttccttgaagtcctcttcctatgtacttcccattgttctagagtaaaggggccgaaactatatgggcaggttgcctagaccttctgacatctggggtagaaaacatggagaacagcgtcatctgtttttttataatattcgttgcctagaaagaggaccttcaaaatcagtggtaccaaacttttttttcagctaagagcagctttaggaattcagagtttgtccaaaggcccaatccctaaaattatactctcaattcttgaagaatgtaaatgccaaatgacaatgaaggtaggccttcattatacaactttatatatattattcacagttttaaaatttttagtcttttgtatcccttctcttttaagttgtccgagattccccctgctcacagattccccctcttgtccttttacctcccttgtacccaatcttccttgcttacagaaaggaagtggaagccccctacctttcaagacgaagtggcactacaccaggatgtgaaagtccagcgaaagagacccaaggggcctagggggcagcacacccccagaagccaagtctattccaggcagtaccagggattagggtctgggctggaaaaatcctggtgttttgaatatgttcaggtccagttcagactcttgatcccacagccacttcttgagtgaggtgggtgttgctctaattcccctgtttctcttgccattttcacagtccctggggattcttcccccttcagcaaagcaaagcaactgtaccagatttctgggttgaatgacatccctgattaataagtggttttcttccttaaaacagaatattattaaagagcatgtatatttcttcataaagccacctaatataacttacctgtttactgagttccttaaagaggaagacttaaagctaccctgagaaatagtatataatattctggggtagtctaaaatgaaaagcagtgtttgggcttattcccatataaaaaggagaaaggagggttgggggtggggaagggttgattttgtttcttctagagcttttttcttcttttgtttttgtttgttttgttttgtttgcatgcaaaaggtatttagttatgtcagtaactgagacttacttaaccattttacaactctttccccaaataaagtacttaaaactctccctgcattagtaggtagccagtttgtattgtgtttataggtttttataaagtcagctactaacctggtactatgtagattgtctaactgtatagatagatagcattaacatttgtgag

SEQ ID NO: 350 - DNA, 2311 bp, Homo sapiens
  source 1..2311: mol_type = genomic DNA
tcagcccgaactccatcttcccctcacaaaaaattctccccatctcattcctctatgtcccatttggaggcggtaagcccatcagattccagaggcacttcttcatctcactgcagacctcaagagaatatcagcagtaggtggtaagtttatatttgatgttttatagttaaattgggggtgggggggagtatatatctaagatcattcccagttttacctaaaatctatgggaacacttgatgggaacatctgagacagccagccaacagtaccatctgtcctgttcagctgatttaataatgtcagctgcaaccccccagctttgcagaattaagaattaccaacatgcctgtggagcagtgctttggatgacatgtagttatggatgcagatgagctctttcatttggtgggcactaacactgcctttcctatttctcatttcacatgaaaggtgagtcaagaatccagccaagttccacatgaattaacaacagatgtctctcttccacacagctagcatatacagagcaaaaagacattctgaaaggatttgtctggtttaggggagaccacaaatttaaaaatgaataatactggtggcaaatactgaggatcaaatgtgtgaaatagagaatgaagcacaggagttcagggatcttgaactgaaaaaaataagtctgggaaagaacagtcctggctcaaatgtttcatgttcattaatctatgaaacctttattaaaccagtactgtgtatcaggcacatgatttcctaaaggagaaattttaacattttaaatgggggttaagggaagttaacatctttaacccactttttccttgatttctttttctttaaaagtggttgttgttgatgtttctcttttgtgcctgacatagttggaggcagaggaaatacgttgttttaaattggttctgaagaaagtaatgtttaagaggatgttttaagaaaatacactgtgcactggttagggcttcatttgttttggttaagtcctgtggcttgaacttgcaccctgttgcctttacaggatggttcccacatcagtagaacgactccgagaaggagggagcatccccaaggtcctccgaagcagcgtgagggtggcccaaaagggagagccctctcccacatgggagagtaacatcacagagaaagactcaggtgagcccatggccttctgctgccaccacattcagggacacatgagccgagtcctgtacagttcatgcctagtgctgagttgaggtgagtcagtttctgatgcagttgggctccaccgcatgctaggttccagcccacttatgctcatttgggctaccacatttgtaagatctagcattgcttgctctctgtctgctcttttttccccaaggaatacctttctgtaactctcatctctccaaagtcctggaaatctacctcgatgaaggatgaagagaaagaagacgggaatcacatcaggcatttagaacatagcccataattaaccactcattttgcccttctggcatgctgcactcacccaatttgtcacaaagagagcagtacgggttggtgatggcactggtgatttaaatgaaaaatggctctttcttacttattctaagaagccaagttgatttttttttatatatgttaccttccagaccctgcagatggagaaggcccagagacattaagctcagcactctctaaaggagcaacagtttacagcccttccagatacagctaccaggtgagatgagaaattgctggtctctagccataggagtgtgttctgggtcccaaattgtcctggtcatcctttgccattgagatgctgtctttgcatatagtttcagcagccttggaaataagtcatcatctgcttgtcctcaggtaataaattatgccagaagatgaatacggtgatcaaagacagacattttactgcctttggtttcctaaaaagaatacatggttaaaagatgaagaaaaaagaatgtagggtattataaatgttcaccagccatttaagggacttgttcgcgtccttattcgtttcctcccaactttgtctagctcctgcagtgtgatagtcctcggacagaatcacaaagcctccttcagcagagttcctcccccttcagaggacatcctacacagtctccaggatacagttatcgaactactgcactgagacctggaaaccccccctctcacggttcttcagaatcatccctctcttccacgtcctattccagccccgcccaccctgtgtccacagactcgttggccccattta

SEQ ID NO: 351 - DNA, 31470 bp, Homo sapiens
  source 1..31470: mol_type = genomic DNA
acgggccattcccggccaggaaacgccgtggcgccgcgttgggcctaactcgagtcctgccgcctcccgggagtgccgtgcgccgcagcccgggcccaggccccggcagcgcctgggacaaggtaagggtccgacagaaaagagaccgaacctcacgatcgggccccaggggagggaagggtcacctcctccgtctccccgcgctcgctctccttgggtcgtgggcctggccctccccaagctcttaggaggatgctgccacttctcacccccctcgccgccttgcacacaccgttgcaacaccccattttcccagggagagagatccccctctaatctaggcgacccaactccccctttcatgtttttcctgggtcaggacgcttcccctcccccaacgcctcttcaccccctttcctgggaactgcctactccacgtttacctttcccttgaggagaggcctcttgctgccctccgctcgaaatacacaggcatactttttttctctccccgatcccccactccctacccccgttctcgcggccttgtgacagacaactctgatcgctctgggggccgcgatctcccctccgtaatcttcctggacgccttccctctcgttttctggcttcccacctcagatggctgcttcccaaaggcattaccttcgccacccccaccacacgttctctggctccccgtggcgtgtgccacagcgtgtctgagatagcctcgttgaatgtgtagggttcgagcctggagttgagccagattgtgtcgttttacttgccttgggcgtggagaacgatcttgtgagaatatcttcaaaggcagaaaaatattccctttatgaattctctttccctctgcgtgtaagtcgggaatgtgaagaggagtgtaggaaagagccctggttcaagtaggtaaatcgcatgagagggaaagttaaactgttgggaaagccccttctatgctaattgattctatagagtccttgcttgtctcacttcttgggcgtcagtggtctttctcttggatatggatgctgcagtcagctctgctggtctgggtcaggggtgcgtgtatgacctgcattttctgctttctcatgttacttgtgcaatgtattcaccggtaactcatttctttcccagacctctgggttccactgggctttgtctatatttaagttcatttctccagtttccttcctgcacataggtactgaacgaatccccaagttctgtgctaattaccttcatcagttgactaaacaagtttttagatgacatatttgtgaccaaggtcatatttacatttctttgttggacagatgttacatagctatacttgtgattggggaggatccagctgagtggagtgtgctgagctttttaggagagtgtgtactccctatttgaaattattttttggttgttaattttatattattaatgtttttaggtcacagaaagttctaagtggtaattttagatgtgtgggatctgagctaggactaaagcagagaatacccacgtaatcagaggtttctgggctccatagaggacgtagggcttttttttttctattggatttcttccagttttctcaggatcattagttctcttctgtagccaaaaattctggcctgttatgggattagagtctttaaggtttactcagactgtcattatgtgtagaaaaatgaattatgccctttggtaggacatgacacaaggctctgtttctagctgcaaatttaaattagattgtagagtgcttgggaaattggctttcaaaagaccaaagcttaatcttcactcctaaactgctggcttaattaaaatggatatttagaatttggtaaatgttgatttttctaataaaaggccttggtttaaaagggtgaccttaggattgtttctttcttaaaagcataattccagcccttctggcatggagcactggtccaaaaaaaaaaaaaaaaagtgtgtgtaaggagtgggggtggggtaaagagaaggttgttcctttgggttggatcacaggggtgagtatacaaggcagcagcagctgctggctctggagctctggttgctacgtgagaagcttgagtagtgctggctgctgtctccagggaaggacagcagtgcagcgtccattaatgctgctggctgcagggagcagcacttaggcgatggctgcttcaggactaagaagaaaccttgcttttctgggaattttcactgctgagctggtttgctttttattggtggggagatgggaattagtaattcataatctcctacccatttatggatattggcatctggaaactggatcatggttaaagcctttctttttttgtttgtttgatttgatttttgttttttggcagatttttgttttttatctagacatttgtgcttggataggactaaaagttccattagagttttaatttttcaatcagtttaaaaacccaagtaataattttaagaatctttctgataaccacaataggaagaaaataacaggaattttttcctgcagctcacatatcatgccttcctccatctctttaatcatagaatcaattcttattattttgttatgtgtctccatcctttcgattagaccacatttaccttatagacgatttgctaaacattttactaagcttgaactcttaaactctaaaaaggtgccattttggagtggtttctaaataaatatttttaatttgtatattagtaataaacttctccagattagatattttctttggagtttgacttataagattgattcattatatacatgttggatatagccttctgacatcacaaatatatgtctttggccataatccatctgaaatgtaggacagaccagaagaaatatgcagaaatcgaataagtctagttcaggatactgagaagatggcctctgagccccttaggtgatctcccctcccccacaactcctgaacattaggatgatctctgattaagcaaaacagtctgagcgtggaaaaacttgaaggagaaccaccaccaccaattatatgcaatactggacatattcctgtgtgctgtttttcttccccaagactcgtgtatcctatacttttttctctcagaattttgatttgttcattttcgtgtaaatgtacttaaatctcacaaacatctataatttgtagtatcactctggcatttgtggcagagaaccaaaaagaatggaaatgagttttgtcattcacaaatgtggctcacattgttttcccagtaataaaagcagaccaatgaaacagaacctttaatggatactattttaggaggttccaattcttattactatcacatagataagatgcaatagcagataaatatgatttcatgtatactggctgtttgacatacttagggtttaagataaaaatgtttgtagttttttactctgtggcttaagttgctatataaaataattgcttttacactcgaatttcctgttgtttggaaccttttgtgctcttgatattatcattttttagaggatcatacaggcccttttcatagaaggatttacttaagttatacccttgaaaacttttttatatcttttgatactgttttgtgtccaggaactgactttctgaaattattctggcttttctggggagaatgactatttcatttttacctttgaatggggaaataataaagtgcaaagtacagatttgcagataattacttttgctttatcctctccatgttgaaataacttatgaaaaattaggccatagttaacagcagtcaatgactattggatacattttatcagaggggaactggatcatgaataaaataaaattttaaaaataatttttggctgaactctggtgattcatcagtttaatttgaagtcagaaggtctagcagtgaattttatttataaaaattgtatttcaagtgttgaaaactgaaacttcttgaccagtatattttgtttgaggcatcaaactttgcaaaatgtgcatcgtatatttagtgatataactggtagtcatttgtaatttaaagtattctttcaaaggcactctttagaaagtaatgtagtgtacccgtgatgggcagggattggtaccattccttactgccaaaaattccaaaatatgtggcaaaatgattgatttatcttgtgggtgggattctgggaagttcatgaaaggtggagagaatatagtttccttcacttgtctatatacattttgttaaataagtcttaggaaaactgttttattgtatctttaattatgaattgcgtaaaagatacccagtaactttggggggaggtgctgttagaaagcattacattggagagaattcccctaccctgggacaaaatgcattctgtctttaatacttagcgaagggaactatgggataaaataaacaatgaaggtaagctcagtctgctttatatgtgccctcactgagcaaggaatttgtaatcgcatcgtgcctcattcgtttataccatcatattgattttgtttgctgagtacctgagggaataccttacttaatgtaaggtcacattaagtatgtttgatatgaagacagggaaaggaattttctgcttcttggagtaatgtcttagtatttttaaaacacttaagtttttacatcaggccagttttgcctgatgctcatgtctgttgctttggttgggctgctgctttctcttctgtgttcttatgggttcgttgtggtataaggattcccacagctttcatggcagtatgaagtaatgagaagcattgccttagccatgttagttacatgtatacttttggcctatgttatgaatcacaaaaagcggtagctataggaatgtatacaaaatagatttctgtctggggaatcaagtttttgatttgtgctacctaatggaggggaaaatgctgaatttcttgctgctctgtttgagaaatagatggaagcatgggaggagccagagacctctgcagcaggatttggtctaagtagaaaaggaagatttttgtttcaaattgccagctgcttatgtcagactgactcccttattatgcctccagtaggcctgtcaatatggccaaacagctagataagtgcggggcaggacaaagggctctttgcacagcagggaggcaatgttggtgggggaggggcaggaggtaggaaaggcaagaggaggaggttcttttccctgggagattattcagtttggcatacaattaaagaaatcatttttagttcccactcaagcattgaatttttgccaaccacatactattaaccccaaatttgatacatttcagaatatcttgtagggatccattctcgccaaggaaaaataaaaaaataaataaagctctgtataggttaaaataaaataaatcccacactctgcaccctcctaggtgcaagtcacctcccgaggagacccgttctagagctgaattctcattaagaaatggaaaagaatactctatctgaataaaaacacattgtaatacaatgtgtttatttgggttgggattggacctgaacatgtagaataatttgtttccctttatgaaatagttgctcgtagttgtctacaattttatttcattaagataggtagcacattacagctttcatgtgttgggttgccatatgtaaaatgctaactgaagaaaggctactttttaatttcagcctcatccttagttcctggagaacctgatatttcctggagattactccctcccccaccttttagtttaggcaacctcttttgatacatttgtgttcagctcgcatacaagtgggatagttgcatccagtttattaagacttagtatgaatcatagagttggaaaagatctgttggttatctggtcctttaaaccaaaatcataatgaaatattttgaaatttgggtccctattgaagttttcattaaaatgttaaaggatcggtgttctgaacaacatttttagttacttttaaaataaatgttttgcgtcagttctttttttaaaaataaagaatttcatttataggcaaattagctggcaattatttgaattgtgataggatttctcttttatgaaggaatatatgacaaggtttttcaaaatgcttaatatattttaaaagactttaatttttagaaataattggtttgaacagttttccaagagcacatttgttgcttgggttgaggtaccacctatattgcaatgttactaaactagccttaaagttttcccttctgtctatactgcatgcaacaataaagggaactggaatgttaatttccatttatggattagcagaggagatgttttaaccgattaataaccaaaaaactgcctttcgtacacgtaatattaagcaagcctgaccaagttttgtgttatttctctctgttaaagaaaactggatgtgttactacttaacattatattgttatttaatggtcttggcagtaatgatataatatttcgaccaaaagaaattttgagtaattaattattattgtaattagttggaagtttctcatcagtaaaatagcaacagcattaacacaaaatctagtgagctatattttatattactacagaaatttagggtagtcatttctttctttataatttattcacatggattatttccataaatttgtgggactaaaatagaagccatctagtcaagcaccagtctccataccagacagttttctctgcatgtgctatgacccacattgccagtattaaacatcctttacaccctcccccttcccagataattagaaatctcttcagggtagcttccattgctcctattacctggatcttgctagaggctctaagaagttcctggtaaaagtgagacagtaagggaccacattttgattccaaaggttttgataactgttagggctccccaaacagctaatctcattttcaccaagacttagccagcagagggctggaatggaggtgaaacacaagcactgtacctcatcttgcctgtgcagctgctccaccttatttcctgctattattatctcacaacgcctcctcccatcaaaaagaaactaggacaaagggggaaaattggatgggctaatgtgatttttattatgctaggttgtgggcttgtttatatgtacttaaatacaaagctaatttgccccattcttaaaagtctttagtgatagagattttgtaacttctgtatcttctactttctttcttgataaaccatttcagattctcagccttacagaaagaaaggttttaagcatacttaattttcgttggccgttcacagtcattattaccaccagatgccactgtattattagcttgaagaaaggtgggctctcttctgtacataatatctgcaatttgttttggaaaatactaatttgtataaatctgatttatgactaaaataaggttaaaaattagacctctatgtatgtttaccctattaccttagtgggggtgaaattaattagctctttgaacataaatttttcatgtcttagagttcttttttcaagctgcataatttatgttcttcaagccatttttatcccataccacccccacaaagggggaaattttattttttatcatttttattgtctttcaatggtgagattttcgccaccccactcctgaaatgtgaagactcaaataaaactgagtaatctaataaggtatatgcgttgctgaatgtagtaagatgattgtttcatcattcttagatattatgatctagtttgaatctggtttccagtatcatgttagcatatttaatactgttgatatgttaattttaatacatgcccaggtggatctccttgctttctatttgtgccccttgtttgtcgttttgtatgaagggggtttttgttgttggattttcttccccatctctgtgtcctgttatgttctttggcttatgtttcaaaaattctgtttcctaccaccaacctctgtacatgccacaacacatacaatttgtactttcacagtttctgtgaagtaggatgatctgcagttaataatcaactgtttgggcattcttggtatccaaggaaggttttacttagaaggaagaacctggaaggacctgttggcaattagactacttctgcgtttattttacattttcccttattaacgtaggctgttgagagttgacttgttttataagagaaaccagattgacagagaagacccccaatcagatagagttattttaaaaataaatgtgtttattatggtaacatttggggtagaatctaaagggcatatttttaaaaaaacttttagttctaaagacaaaagagtttaacctaaaacagaacaaagagaagggcctttgaagcagtatgattgattatatgctgaatgtagcattagaatgttgtatgaaagcataaatttttattttctcaatttctatggtacaaactactatgcccatggaagtatgtgtttatgcccacagcctgaaatatattcggtggaatgccttaaaaaagaataaatctggccgggcgcggtggctcacgcctgtaatcccagctacttgggaggctgaggcaggagaatggcgtgaacccgggaggcggagcctgcagtgagccgagatcccgccactgcactccagcctgggcgacagagcgagactctgtctcaaaaaaaaaaaaaagaatagatctgaggaaaatgtaagagcaagtctaaaattttgaagtcctttttgaaatgctattttttcctagacaaatttagtgttatttgtggcaaatagaactttaatgtcgtaatttagtaatagaacaaaataagggtgggtttacatgtccctgcacattttaggatggagctaaaaattataatgtctgcataccaaattgttacacattttaatattggggcttttattgaaaaagtttacccaatatttagaaacctttaaaaacaaagtgacataaaatattcacagataaatcaggtagtcaccttattggtggcatattatgtaagtgtactaaagccagatatttagtgttaatccaaaaatatgaaaattatgctaacatcatatacagatctcagaagttgctgtagccagccaggcgtggcggctcacacttgtaatcccagcactttgtgaggccaaggcgggtggatcaccttaggtcaggtgtttgagaccagcctgaccaacatggtgaaatgccatttctactaaaaatacaaaaattacccgggcatggtggtgcgagcttgtaatcccagctacttgggaggctgaggcataagaattgcttgaccctgggaggcagaggttgcagtgagccaagatcgtgccactgcattccagcctgggagacagagcaagactgtgtctcaaataaataaaaaataaagaagttactgtagatgccactcttacttaaaccctaggccatgtgtggagtcccaggggaagacatgtatttttagagaaggaaggctctaggtaggtgtaaccttcctcttacagtttatcatgaacagttagtatgaaaaggaatggctggaagtttgcagtagtacaccgagcaacaagagaaataaacatatcccacttcatgaaatgactatgccagccaagggagatgaaaaacaattttttttatagtacacctcatttttttaaaaacactttaatactaggaatatgtttctgtggcaaatagttacccccaaaggattatgtcaaatatctcttgtgaaaattaattttaaaattaatcttttggctgggtgcggtggctcatgcctgtaaacccaacactttgggatgccaaggtgggcagatcacctgaggtctggagttcgagagcagcctgaccaacatggagaaaccccatctctactgaaaatagaaaattagctgggcgtggtggcgcatgcctataatcccagctactcgggaggctgaggcaggagaatcgctcgaacccaggtggcagaaattgcagtgagctgagattgcgccattgtattccagcctgggcaacaagagcaaaactatgtctcaaaaaaaaaaaattaatcttgtgtagatagtgaccacgttttactttccttgggacagtcctggtttatacctgctatcctagcgtaattagtaatagcacccgtttcactctcaaaaatgtctcaatttggatcataaattatacgcttaccataattgtagaggattgtgagacttttagtcgctacctagcaacctagtttttcttgatagagctcttcttattctggagtctcctgtgctgcgatttatctgttgacctctctgaacccccatttccaaatgagcagtttttcgaatgtcttttttcttttcccattaggtggtagtaagggaaggagtaggtatagatttgattaattttttaattttttattattaaaaactccaattactacaaaatagaaaaatactttggagtttattaaactgttagtttaaaaggttccatttgatcaggataaggtccataccttgattggtaagtttgagtctttatagattctgttttttccatgtaggattcttgttaaagaaattcattattttgtggagttcgtactctggattttgaaggttggataatcatttaacacattcctctattaaacaacctccccccacctgtatttcatgtaaattactgcttagatagattgtaagcatattttataatagtactgtgtatttccattaagagttacataatttctgcttgtctgtgtaatgttaagcagctgttgttattcattgcctagatcaaactttgtggtcttaaaaattgaagacctggaagagcttttgtttgtgtgaattatgtcaagatttaccatattagaaactaaaactgagaaaaattttaagttatttattaatattaaaataacagtaataaagcctgctaatacaagtaatgtgattttttaataaaaataacatttttaattttataagtgtcgtttgacatttttgcaaatctctttaatgtctgacttaatagaagacagctgctttctcataactccttctgcatttaatttcttgtgataagttgttttggttgaagactgaagaaaatctggccttgtacagataattggttggaaaatggaagacctcatataaccctctgacagaatctagaggacttcaggcattctcacaccaccctttttgagaatcactggcctatattcatgatttacttcatattagatgatattttcttacttcttcatttattgtccggaatactcacccttatttttatttggctatactaagatagtttatatacagaaggtaagataagcacttgggttttttacccccttatttactagttttcaaaataatgggttggtaacttagcaacatctaaagacgtgaatgaagtattattattgtgtactcatggttttaaacatgtttgatatgttacagtctctggcagttactatttttgacattcaggttgtcctacctttgtctgttggctactaaattcttttgattcattcttaatactttcctcacttgtttccttgcttcctactattactagatgttctaggataattttgtacattttttgccccaaacctggaatcagccatttctgcagaaacctcttcattcttttaatgaaaaatggtacttagaaaccacagtatggatggtaggagtgttcattgctcttggtttgggccttgtttctagatttttcaatgaacaaagtttaaaagtattttatttctttttaaaaatatcacttggtattttaaaagctgcatttcaaactcagtgctacatgatgtttacgtaaacctaatctttctccctttccccatgcccaaaatctcagttttcactaacaccaatgtaatttctctttgttttgtgccacaatacacacactacagttttagtgtgacagaacaatatgattactggaaagtggctttttgttttgttttctcatgtctttttgcccttagggtatatccctttagagatagagatagtcatgcctcacttgatgaggatattttctgagaaatgtgttgtcaggtgatttcgtcattgtgtgaacatctagaatgtactaacataaacctagatggtacacctaagctatatggtatagcccattgctcttaggctacaaatctgtgcagcatgtgaccactggatactatacgcagttgtaacacagtggtaagcatttgtgtatctgaaaatggaaaagataaagtaaacatacggtataaaagataaaaaatggtacacctttgtagggcagctccattacagtcttatgggatcattatcatatgtggtccatccttgactgaaatgtcgttatgtggcacatgaccatatatagtcagattacagtattttgaaatcccccttagaatagttctctatggttgtgccaccagtttgatacacagtgaggttaatttgttacattttactttcagatttttcagggattaggttttgttttatgattatgtaaaatacttaaatggttaataagtgaaatttacgaagctgggtataatcagaaaaattgagcttctatcctagtgtcttccagctggttctctccctgtccctgtatgttagactcaacagagtcatcatgaattttcagagtgatgttttgtcgatacttccccttttagcagaagaagcatttaggttagttcatttactaaaactatttccttctagatttttcactaactaatatttttacactgtagaagaggaatgtggaaatttctgttctttcttttttggaaccagaatttcttggcttaatacaagcagtttgagataagaaactttctccagtaaaaattctctttttttttttcttttttttcttttttttgagatggagtctcgctctgtttcgcaggctggagtgcagtggcatgatctcagctcactgcaacctaggcgtcccaggttgaagcaattctcctgtctcagcctcccaagtagctgggactacaggtgcctgccaccacgcccagctaatttttatatttttagtagagacagggtttcaccttgttgttcaggctggtcttgaactcctaacttcaggtgagccaccgcacctggccaaaattctctctcttgaaatgccagaccatgtttgtctctgggaatttcaggtacacttgggacactggtgctacttgaagtgtagagagctcatcagttaacatttcttgaatggtttgcccttagacctgaaatgtatgttatttagaaaggatgtcatatattttttaactttgtcatttaaaatccaagttatttgattttatgtgttttaaataaaatattaaaactttaaaagtcttgtacctgttaaatgttttatccttcctaattacagtatcttaaagttatcacatttcagcaatacgtcactttctaatgactaatatagtctttaaaaatactaaatcaagatataccaaaggtgaagaaatagtgattaagaatgtgaggattctagctgtggttttcttgctttggctttggccaagatgagtttaattctttggtctaataggaataatacttttctcctaaacattatgagcattatttgagttaatgcatgaaaagtggttaaaggaacagtggctggtgcaacataagcatccagtaaatgctgcctttattttggaagtggttattgttacgagtatttgatcagttctctaaactctgtctgaactttacttagaattagtaatgttcatatgctgtaaataacacctgattttcaatacttcattggttatatgaaaagaaccaactgttaacaaaggaataattggtatctagttaaaatttgaggcctctgacttcacaagtataccagtgcttactatataaatataatcacatttaaaaatttaataaagaaagttttaaggaagtaagtctccttttcaggatccagggtcctttacaaacactggatcctgaaattgtattatttgttgtggctttagggtattgtgtatgctgaccagagtcacaggtggtttttttgtttgtttaacactagaattttgagatacatttgtctttacatgccctcaaagtaagttatataacaccagattgttcattagttcaggtttgatttttttgttgttgttttttgtttttctttttaatactctggggttggagtgaggttgtagagtgctataaggaattcctattagaagatagtattttagatatgggcattctaggaaaggacaaaatggtacactaaagttatcttcccttttcccccaccaccaaaaaaataaggagcaaactacagtgcacagttttgggttttttttttttttttttttttttttttttaaagagacaaggtcctactctgtcgcccaggctagagtgcagtagcacaatcattgttcattgtaaccttgaaccactgggctcaagcagtcctcccacctcaacctccagtgtagctaggactacaggtatgtgctaccacacccagctaattttttaaaaaatatcttgtacaggtgggggtctcactgtgttgcccaggctggtcttgattgaactcctggcctcaagtggtctcatacctcagcctcccaaagctctgggtttacaggcataagccatcaggcccagcccacattttgttttttaaacaagtctttatcttttggagatacatgctgaaatatttatggatgaaatgaaatgttatctggggtttgctttagatagagaggagataatagatgaaacaatcaacttattagttggtcattgtcgatactagataatgaataaatggacttctttataccattttactttcatactttatttgaaacaaggtcttgctatgttgcccagctggccttgaactcctggcctcaagagattctcatgcctcagcctcccagagctttgggattacaggcatgaaccaccatgcccagcccataatagaaagttttaaattttaaaataaaagtattcatagacttggctatcatggatcctggtaaagtagactagtgaacataatcagatgtttcagtctttccctgttgatactgcttgccctctgagcccatttcctctcctgatcatcgcctgctatttccaatcaacagaaaaaatagagtagcctacatatataatgagtttatactaagagggaaattttaatattataaagaagtctatacagattctggagagcattcctgaagagaagattgaggaagcaaatggattaattaatgtaatagtgtgttcagtgtgcaataggtaacattttatgatatggttgaatttctgaaaaggtatcttataaatatcagaccatatttaaggagacttccacctctactgataaaatctgcccttctctctccccctgactttattgctgcccatctgtagttttgatcttttttctctaggattctttgcctagaattgccatgggccttctggatctggaacacggatgaaggaagaggatgaatgtttttcagatgttatcccttatgggagtaatttgtaaattctagcttcttcgggtggggggaggcggggtgtgtgtgtgtgtgtgtgtgtgtgtgtgtgtgtgtattatttatttatttttttaagttaattggcctcttccagcaaagagtatacagcagagacctagaagtttcattttttgtttgtttttgttttgttttgttttgtttttgagacggagtctggctctgtcacccaggctggagtgcaatggtgtgatctcttctcactgcaacctctgcctcccgggttcaagcaattttcctacctcagcctcccaagtagctgggactgcaggcgcgcgccaccacgcccagctaatttttgtatttttagtagagatggggtttcaccattttggccaggatggtttccaactcttgacctcgtgatctgccaccttggcctcccaaagtgctggaattacaggtgtgagccacggctcctggccaagacctagaagttttacgtcaaattttgtctctgcagttttctgaggaatgagtatatgtgctcaaataatagctaagtattaagtctgaaatattctagaaaaacagtcacaaagtagttatgcctaggatgtttttgaatattggtactagaacaaatggattcctactagatttcctttttactttcatattcagatgtaggaagagttggaattcaaaatgtgaaaagcagtcttgaatctcagtaaattcttaagaaattcttaattcattgaagagccattggtcgtgtgtgttttttggggagtgtgtgtgtgtgttgttgttgttaagaattcggggatgagtatgaggctatcattgcttctacaaggcaacttaatgatagtttgctgcttggcacaacaggtgaaagggcctttctagagcagggatcttggtttccctttttcccacctagtagtatcattccatgtatttaccaggatatacattgtttagtcctgtcttggctaaataggtaatggtccttaaggacataaaatggaaggatattgtgcagaagaattactagttctccgtagtgtatttttttactgtattctcctcatcaacagatggaaaatttttaaacttagaagaaaaaacaagtgtttttctccaaaagattgagaaccactgcttttaagttattaatggaggtcttcaatggatttgttaaaaatctggagcatggattttttttttttaatttttttgttattggttactgagtattggaaaaggaaatacagtattcaaaaacagtaatgttcaggatttggaactattttactcaggaaaaaataagtttataaatagacattttaatgaaaaggaaaatagcaaatttatggaaatctgagatagtctgtgttttgcttcactctgtttagtgctagaattctggactttgtttggggtcaaactctgatatgacaggaaaactaacagatgattaaaagagacagtaacataaatgggaaagtttaaatatggtatatggttttaattatattttgtataagaaagcagtttataccagttgtattcctaactaaaaagtactattttatcagtttcctgggactaatttattataagttaattaatgacatgagcattttggcccaaatacagttgaaatgttcattgaaactggatcaaagatgagcatatgtgtcaaggctttaaaatcatttttcatattaagatttccagagaaagtttttgtaatatataagttaaatatttttaatgctttagatgacaggaactgttgaaggtcctggatctcataacaagccactagctagctgatccaaagacatttggccccatgggcttctaggaagacaaatgtgcttaccatttcaaagattttattttgctcagtaacctactagacatatattagtgtttgtttgagttggtcgttgtcttccattgctgttattttattattattatttttttaattttagagacaggatctccttgtcacccaggctggagtgcagtggcacagtcatagctcactgcagtctcaactcttaattaggctcaagggatcgggatcctcccacctcagcctcttaaatagcttggactacaggtatgcaccaccactcctggctgtcttattgtgttgcccagggtggcctcaaaactcctggcctcaagtgattctcctaagtcagcctcccaaagcgctaggatacaggtgtgagccaccctgcccagccccattgctgttgaacttttttttttttttaaagacaggctctggttctgttgcccaggctggagtgcagcagcgcaatctcagttcactgcaagccacccaccgagctcaagccatcctcccacctcagcctcctgagtagctgggactataggtgtgcaccaccatgcctggctactttctttgtaatttttttgtggttcaaataggaatcttccacgtgcatccaaaatatttttggtttgtgacactcagtgttattattgactcatttttccattggaaggtgtgcctcagagtgggtgagcctttttgccctcagtcttctgtcagcactctaagactccaagtactctaagagattgctcactaaaaataagaacagctggccatctacctcaaatgtgagccgtcacttttgtgatataatcagtccttatctttagtacacagatttatggaatatcacactcactgtctgcctgctttggggtgtttctcctgtgtcattcatttttgtatattggcatatagcaaatataggaatgctgtgtcgcagctgtgggtcatgtatgtacttgcagttagctcttgctcccaagaatgcaagaaatttatcaacaaactcgtgtcataaaaatagtttacagtgatttttttcttaaaatatttcaatgattaagactttttttaataaccacaagtgtataattgtaaaacctaagcattactcagcaaatctagcaattgttgaattgcataagcttcttgttcattggaacttttgctaaagaattatgacctttgatttcttatcaccatgacctatcattatgataaacatgcccctcttatgtatccttatacccattataaggataaacaagggatagctccacccaccagatgtcatagacacaactggtattttggggattttgctgtagactaatcctggaaggaagagaggttatagataaaataagattggccatgaattgattgttgattaaagctgggtagggaacattgggttttctctggttttatatttatttgaagtttttcaccataaagttttttttttttaagataaaaaataaaagcatgaatagtgtaaacaaagttttgaaggagaaggaaacaggttagtagctaattaacaaaaatgttcttgttccattcaggcacaggagtttggactagcccaataagcattaaggaaaccattatttgtagatttcagataatgcaatgatagtaaccaaagttatgctctagaagggataacatcatggaagaatatagagtagattggagggttcacaccccagaggtagtgagaccagttcactgctattatataatgctaccttgaaatcatagggaggcgactgatgtggtttgctaaaagtctccaaaaatttcaaaggagaatagctcttcagtcaggtgctagtgccagcacaacaaaaaagagggttttttccctcatttggccagggcatggatttggaccatgtgggtgtcataatggagtataccaagtgattttgttcctatgatgaaagtgaagtccatattttgtctcctgtcttttagtaaatcagtatagataagtcttttttttttttttccccccgagacggagtctcgctctatcgcccaggctggagtgcagtggcgtgatctccactcactgcgagctccgcctcccgggttcacgccattctcctgcctcagcctcccaagtagctgagactacaggcgcccaccaccatgcccagctaatttttcgtatttttagtagagacggggtttcaccatgttagccaggatggtctcgatctcctgacctcgtgatccgcccgcctcggcctcccaaagtgctgggattataggcgggatccactgcgcctggccaagtctttttttttttttaattattttattctttatttttttccccacatattctaaaataagtctcttacagtgtctaggtttctttccaaaggtgattaaaaatgaagcatcatattttaaacttctgaggcagaactgctagaacaagagttttgttttttttttttttttgagacggagtcttgctctgtcgcacaggctggagtgcagtggcgcgatctcggctcactgcaggctccgcctcccgggttcacgccattctcctgcctcagcctcccgaatagctgggactacaggcgcctgccaccgctcccggctaattttttttttttttgtatttttagtagagacggagtttcaccgtgttagccacgatggtctcgatctcctgaccttgtgatcctcccgcctcggcttcccaaagtgctagaacagagttttgataatttgtttgaaacgaagcactcaaatcttctagtttatttgcatttgcagtcagacctctacagatgccagctagattacagatggctagcataagtttttttcattacagaaagaagaaatttagagcttagtgcggtctattaaaagaattaaaggttatgtcaaaggacaactataagaaagtactttggttctgaatattgcttcagctagggtttattttgaagctcctagcccaaatttgtagaaatgcaactaagatctaatatttagtgtgtaagaactttacaggacatccagtcagtagtagtcttaaaagtgaatcacataggctgaagcaggcagatcacctgagcccaggagttcaagaccaccctggccaacatggtgaaaccccgtctctactaaaaatacaataatcagctgggtgtggtggtgggcacctataatcccagctactcaggaggctgagacaagagaattgcttgaacccgggaggtggaggttgcagtgagctgagatcctgccattgcactccagcctgagcaacaagagcgaaactccgtctcaaaaaaaaaaaaatgtgaatcacatacataaacattgggaatttgcagataactttcattttagggtttctagagcgcagtggtgtaatcttggctcactgcaacctccacctcctggattcaagcgattctcctgcctcagcctcccaagtagctgggattacaggtgtccaccactatgcctggctgatttttgtatttttagtagagacggggtttcatcatcttggccaggctggtctcaaactcctgacctcaggtgatccacccgccttggcctcccaaagtgctgggattgcaggcatgagccaccacacccggcccacttacaggatttttctcccccttcatggttgtataaatgcagtacttggcacataggcaaacctgaacagtttgcaagttgcctacccttttctactttggataaaataaacctcttaaaatagcacttaacatagtaatatatgtatattaatagtagttacttcatgtttgttgaatgaatgaatgaaaaaagtagcaaatctacataatataaatcccaagacagccaggaattttatctggacctaattgtcttacatagcaccaattggtacttaataaaaacaaggctgggcatggcagtatgcgtctgtggtcccagctacttgggaggctaaggtgagaggatcgcttgagcccaggaggttgaggttgcggtgagctgtgattgcaccaaagcactccaacctgagtgacagaccctgtctcaaaaataaaaataaaaacaattagttataactcagatgttgctatctaaggtaagtagtaattactataataaacaagctatatattaacatcttaattttctttcctctgaactttactactgtaggtgtgtagtgaacttcatacaagttaatctttttgtagctctatttcttcatttctgtttgttcatcggttggagaaattttgcttaaattaatgaaagtaaaaatacagatattaatggctcataaatgtgcacaacccacttcatctatagtaagtaaaagtggctcccattttggggtttgaaaatgaagaagatctgaattcacagagaggaggcacgtgtagagatatgagaagttcttttcctactctactttggtacattggtctctaacacatgttctgagcctcagaacacagtagaacagaaccttcagaaagtgttgagagtataactctttaaagaggtttagtcagtctaaattatttgagggcatcatctttatttggtacttagaagtctaaaatcttcctgattgttgttaaggttacaaagagtctgtgtattgttggttagttgagcagtaaatacctttttatcattgttaaatgggttgtaaataaaatatttttcttcagtgttaaaataatttatgatcacaatatttagataataataataataattctgttatttatgatatgtagtcttatcctactgccactcccctcttctgctccacatactactaagtatgacttggtctctataatacgcactaattatgaagttttttacggagaaggaaattcttaatatagactaggattttttttcagttgtcttttaatggccttttattctagtaaacttagatttcttatagacatcggtttattgtgccgagctcagtagctcctagagggagtataaatttaggcaaaggaatcaaggaataaactggtattgtagaagagatgggagaaaaggaaatttttatttttgctttaaattactaaatcatgatgtttcctgtctctcagtgcttaccccaatcagtgtttctctcttttcttttttcctttcagtcccgaacccctaaaattctttgcttgcattaacttgcttcagattataagcctaattttactgttccaaatacatgaacttttcactgtatctccaagtgctcttttagagttcatctctttgttttccagtaactcatatttgtttcttcttatgcttaacacttctctctcatttttttttttcatgtttctcacattttttctttccacattatctgctgtagcaaacttgaaatatatgcttttggagaagagtaaaaacagtgtttagccatattcaggttattagcagcagctcctctttcttcacatatacttaaagggaccagaaagttatttaagctcttacttgctacaaatgctgttccatgtgctcctatgagtcagcacaacaggtattttttttttttttattgtacagatgagaaaactgagactttgagacattctatgaattgcctgagctagttggcagcagtgccaggattcatagaaatttggagcaggaagacaacacaatgaagattttactttgaggaatttagggttcatctatgtaaagtgatttttctgaggtcactaattatgttgtaggctagaactcaagtctcctaactcctaatatagtgccttttttttcttttctttttttatttttttaggagatgggtctcactatgttgcccaggctggtcttaaactcctgggctcaagcaatcctcctgcctcagcctcccaaagtgctaggattacaggtgcaagccaccgcacctggcctctaagagtgctttttcctagcatacttttcttctcctaaggtaaaaggctgtttgtcatggtacagctacggtgattttacttgagatatttgactttgagatggagatgaagataagtatataatgcagctgccacattcattctcatacaaggtaaagtcattcaaaagataaatcgaagaactatagatgtatttaagaagaaattcagcctatatgtaacaacaaaattttgaataatcaagttcagaaattggatttttaaaaacttattagctactttaacccttttgaaatattcccaaaaagtgttttctcttcctgagttaaatttattcatttattgacctattaaagatttttttagtgcttcagagctattctgtatatctgttcattttcgttatttagtagtatatagaagtaatagattgggctgaatagatttatttcaggatatatcttagatatttgtgttttttcatgaatcccagtttaagggttattgctttcaaaaggaagaaatttggttagtcatgacttttggctagttgaagtttagagaagtgctttatacaggatcttttatttagtgagaaaaaaataactttttataattttataatactgtgtgaaaaacctgataccaaaacttctgaaaaagaaaccaggcctaggagatgaggattctagggaagattattaaattgaggatatttttaagttagattctaaattagtaaatcgtggctaataagatgaaaataatctgatcctttagtaagatctgaagtaatattgttgccctgcaaaaaagtggttgttatcagcataccttatatgtcagcctaagcaagattagattttctcttttctctgatagatgccaatatttaacattgacttttatctactttcaaaaatatctatgaaatatactttctgtctctgaattagagtgtatgtatatttgtgtttacttgaaatgttatagctggatgatagatttcagagcagtttttatgcttagggaagccactgcctcccaaaaaggttttcttatgagaatgaggaaaataagtataaattttcatatttatgttattactattgatgtgcttggataattgtatttataaaagtaaaaaatgttcagtattttatctgaaatttaataatggatattgtacagcctaaggaattaaaagaaaaaggaccctttgagaaaatggcttgttcttatgtatcttaatatatactgtgttcactttatgttttgtcagacactgaaattgaggaagagagattttggcgttctgttggtttatggagagagttgatcagagattgctccttggctgagttgctgtctgcataggctgttaacaattgtttctctggcagcagatcttgttcatcaggattgcatcatttctgggagaatggccaaggtccacagcctcaatacaaagactgtctgaagcatatgaggcctgttctctttctgaagcggcactcctcttcctgccagtcctcttcacaggattactgaagcagacttgttctgaatttctttcgttggattggttgtttattggacttttgtctgccagctgcttccgcctcacctgtctgatgcaatttcttcttctgaaatctgttggaattgttcataaaacactttttgtttgtcttctctgtgagtgaccagggagatcatacaggtcttgtgctttcagcaagtcatatagagaagagactgtcagaatgatgatacagagactgttggccatttctgaaaccaattaaaaagatggggtaattaagaaacatttctggcatgttctatttaacatccttttccctagaaactgtatgtaaatggcacctcctaaagagagtactcggtactactggaagatacaggctgtgtctgtttctgaatccaagaacttactagtgttcctgtggattctgatggattgttctggaaatagttaaattaataataaattgaaactgtgatgcattcatttaccccctactgtacactcacatctatttcgctgttttcctcctttcctttttttctttcttatttgctattgcttcttccttgatttactttatttcttccttccttttactgttactttgatacttttatttctctaattctgggtgtactattttaaatcgtttctaaaaaatagtttattttccagttttttaaaattagaaatcataaaacatcaacataaatgaaatgcatgcgttctaatgcttggtaactggaatcctatgaatagctcttttcatgtttatgatatgttaatctttaaggtgttaataactctggctagcgttaaatttgacttttaggaaaaaacaccagagacttaaaggatactgatcattttcccttcctttttggaaggtagaaaattaatttaagcgccattttttaagcatgtttccatttgaccgcaaatagaactgactcctttttatcactcttttttatagtaggacaagaaactagatggtgtggaatgaagggaaagaaaggagtaataaatatggacttgtaatttaatgggtgatgatggccccttgtctggctggacagttgtcggacatcgggttaaagaaagaactctgaatttgagaagtgttcagtgaagaagggaagcaccttttaggagagagaaaaagaagggatcccttggaaaatgagataattctaatttgaaggaagaggaaaaattagccagtgacataagtatttaccatttaagtcaaataatttccttctctaccatctcgtttctggctttatggaaaaataaaaaattaaagggcaaaaaattcagtgccggatggacgtagggtggtaaacgagatagtatagatgtaggatgataaacaagacagtatacagaaacataatatagctgtagaattccattctgtgtgttcatcaatgttatttctttctgtactaatttttgtctcaactttttctaggtcttcagaactactagcagataatttggggggacttcatattcagaagtctatataaaggtgactgacccaagtaaatccttttaatttctgttttattttttgcattttaatgactgctggaatcatgttgtagtaaattgtgattataatttacttagcagatatttctggaacttctctacgtgtcagttattgttttggccattgaaactacagcagtggataaaaatccctgttctcatagagtttatattctggtaggaaaaaacaaacaaattataataagaaaatactgcatttagatgatctgttaaatgttcctcggttaacattttaatagctacattttacagagttacttagggaaggaactattcttagggtaatatttgagaaatttgggattattaacagaatttgaattaagaagcctcatcattattaaagcattagttagaatgagatggtcaagctaacctattatggttgctttcatcagaagaatgaaacagtcatgttaaactagacacaaggaaaatggaataatttttatgaaatagaaatttatagttaccgacaatgtttctttttttttttttttttttttttgagacagagtatcattcttgttgtccatgttgaagtgcaatggtacagtcttgactcactgcaacctccggctcccgggttcaagcgattctcttgcctcagcctcccaagtagctgggattacaggcgtccgccatcgtgcccggctaatttttttgtatttttagtagagacagggtttcaccgtgttagccaggctggtcttaaactcctgacctcaggtgatccgcccacctcagcctcccaaagtgttggaattacaagcgtgagccactgcaccgggctgacttaatgtttcttaaggattcatcaactatccaaaatagctgggttggtgtttcattagtgaatgtagcaatcatttattcactcattaagatgttatctgaagtaacttttccatcttttccttttagtatatcttttaaaaattgctctaggaaaaatatcaactatcatcttgggtttataacttgtcttttatctagaaactgtactttttttttttttttttttggagaaagagtttcacttttgctcaggctggagtgcagtggccctgtctcagctcactgcagtctctgcttcccagattcaaacgattctcgtgcctcagcctcccaagtagctgggatcacaggcatatgccaacatgcccagctaatttttgtatttttagtagagatagggtttcaccgtgaaaccatgcattttttaaatgggtgtacagtcgtaatggctacaacaaagggtttttaatgatattaagtacggtttttggtttaagtcttttactgaaaatataaaacaattcagattccctttgctgatcaggggaggtacggtgataatcagactttcatatgattatctggtcagacagctttggggcttttcttttaatctgaattatacagtaagactaatagaaagagtagtgaccaacagcccccagtatttaactgtcttttgggtttacttgatgagtgttcttgttttatcatttacagattttacttcaatttcccaaaggcttagaagatgtactgccaaggtctctgtttggatatactgttagggaaaggaaacatacatgtgtaagactggcctaaaggcaaaaaagttcatcagtccctttttttttttttttttttttttttttttttttttttttggcaacagggactcactttgttgcccaggctgagtgcagtggcatgatctcagctcactgcaacctccacctcccaggctcaagcaatcctcccacctcagcctcttgagttagctgggactacaggtgcatgccaccacaccagatttattttttttttttgagatggagtctcactctgtcgcccaagctggagtgcagtggcgtgatctcggctcactgcaacctccacctcctgggttcaagagattctcctgcctcagcctcctgagtagctgggattaccagcgtgtgccactacagctaatttttgtgtttttagtagagaaggggtttcaccacattggccaggctggtctcgaattcctgacctcaagtgatccacccaccttggcctcccaaaatgctgggattacaggtgtgagccaccgcgcctggcgcacaccaggtaaattttgtatttttagtagagacaggatctcgccatgtttcccaggctggtctcgaactcccaagctcaagcaatccacctgcctcagcctcccaaagtgctgggatgacaggaatgagccacttcatctggcccagtcatttcccagcccagctatatgtcacctccaattgggtgtaggaacaggcgtattgtcatacccagaggtctcacttcatcatctaggctggagtgcagtgcatgattatggctcacctcagcctctacctcctgtgctcaggtgatcctcccacctcagctcccaagtagctgggaccacaggcacacatcaccatggctggctgatatttttttactatttttgtagagttggggtctcactatgttgtctcagctggtctcaaattcctggactcaagtgatccttccaccttggcctcctaaagtgttggtattacagttgtgaaccactgcacccagcccacaattttttttatttgcattaatatcaaagtaagattggagcatctcagaccatctaccatttacaatttacattaaccggccaggcacggtggctcacgcctatagtcctagcactttgagaggctgaggtgtgagtggatcaccggaggtcaggagttcaagaccgcctggccaacatagtgaaacttcatctctactaaaagtacaaaaattagccagacatggtggcaggcgcctgtaatcctaactacttgggaagctgaggcaggagaatctcttgaagccaggaggcggaggttgtagtgagccaagattgcgccattacacttcagtctgggcaacaaaagtgaaactgtctcaaaaaataaaaataaaatttacattaaccccctgggttgactcagtcggtatcatgtacttttcattcctttagtttttttagtattaataattgttctaatgtcttattatgaatcagtgtatcagtcatgactctctttgtagtcttttttgcaaaagtccttgttaacatgggtctttgacattcacattgactttattcccccccaaataaaatgctttttgtttcatcctttcaatgttttttacactactgtaaaactactaatgtaaagtcacacaaagaacacttgtttccctctgcaccatacctccaaatctcttaatctatttttgcatttttttatacttcagtaatttctgagtctttctgttcccagctttcactggtttatggtcaccatgtcaagctatcctcaccgctttttcatacacagttgtttagtctttatcatgaaactgtactcttcgtgatttcgggggtttttttgttgtttttaaaaagtagtcaacttttttagagcagttttaggttcacaggaaaattcatcaggagatacagagatttcccatgcaccctctgcacccacgcatgcatagcctcctcctggtttatatttttgttcatatctagcagcgtattattaccccacaaataaagttgctaagatgattgcatcttctcccaaaattatagttaagatgatttaaaagaaggaagagagtgttcaatgacaaaagaaggcactaagaaacagctgtttccaatcaagtataaacaacaaattgatctcttttaatttggaagaaataacattattgactgcttgtgaaactgcatttatttgtggcctaggaaaaaaacttaaatgaagatcttgaatttttaaagagtttaggtaaactgggatatttttaataaccatcctttatcttaaaacttgtttgctatatcctaggctgccagaaaattttgtttgggcagttttagaatggggagaatgtgttggttagtgagataggcagactcttcctttcccttcaactgaaaagaaaaacaaaagtaaacataactttttgccccctactttgtgaaacattaatgaaatgcatagtaaacatgggacactgtggctgtatttattttataattatcccttaaaagccttattcaagaatgcagaaaaatattcagtaacatttaagataaacttgaagaactatctgataactaggtatttattttactagatattttccttttctgttacaggattcctcatgtccataacatgttggatgaggctctgcagctcacccccactctcagagtggtcagtctccattaattggaccccgtgatttccaatctctgctgtgttggacgtcatgagcattgcaatccctctgggagtcaccacatcagatacatcctactcagatatggctgctggatcagagtaagtgctactttctaggtagtaggtacattatcagtctgtgtggagacagccttcttatggatagctaataggataatatgtagtattttcttaaccagatcctattccactgtaattaacattagacctttccctttacccccattgaaggtggtggaaaaaaggaattagaaggggaaggaagagttttcagaggggtatttctgggcaaataattaatagaaccaaagttgcaaagtaggaattcattttcatttgttttaatgggtggagaaaattggaataaagtaggtgttactacctgcttctgtag

SEQ ID NO: 352 - DNA, 2280 bp, Homo sapiens
  source 1..2280: mol_type = genomic DNA
atacatttctttctgttttacaaagtcaaaaacatcctttgctggttttgcaccagagaataggggttagttatcatctgtgtttaccatgtggcctcacatgagttaacagtttaaagcactagagattgttatagagagttttaagctaccagaataaaacagattgattttttctcagagcttgagtacagctgaatattgcctctatcttaaaggaagtagacaatccagaagaaaaaccagaagaagagaaagaagaggttatagatgaccaggagaacctagctcatagcaggagggtgagtactgtctgacattactttgctccttctcattcctgctacctccatcatgtgaacctcttctgttctcttgactttgtatcatctcattgatttgacctgaaggttataatttgggctttttccgtaataaagattttattataatttttttatttatttttctctatacacacagtagttttgtagtgattattatctagtgatggtttgaagaggttgtttttttttttttttttttttttactaacaatctggtttccgctgggcgcggtggctcacgcctgtaatcccagcactttgggagggcgaggtgggcggatcacgaggtcaggagatcgagaccatcctcgctaacacggtgaaaccttgtctctactaaaaatacaaaaaattagccgggcgcggtggcgggtgcctgtagtcccagctactcgggaggctaaggcaggagaatggcatgaacctgggaggcagagcttgcagtgagtggagatagcgccactgcactccggcctgggcaaaagagcgagactccatctcaaaaaaaaaaaaaaaaaaaaaatctggtttccgaaaaactggctggtcagaatcaaaatgtattatagttggtttgctctgaattaggaattttctaggtttttgtgagttctgaagtttttttaaacccttttagtcatatgaactaaaattttctacttttatgctgaaaccaatcctgtgtgtttatgaccctgatttgatgacttttttttttttctttttgagaccgactcttgctctgtcaccaggctggagtgcagtggcgcaatctcaactcaccacaatctctgcctcccgggttcaagcaattccccttccttagcctcccaagtagctggcattacaagcatgcgccaccatgcctgggtaattttttgtattttagtagagacggagtttcaccatgttggccacgacggtctcaatctcccgacctcatgatcttcccacctcagcctcccaaagtactgggattacaggcgtgagccactgcacccatcctgtttttctttcatattaaagtttcaaaataactgaccctttttgaaaagtttatgtttgaccttgcctttatttacaactattccccacatttaaaatgaaatattttatttttaatcttctgttttccaagttatatgtgtcatcttactggtagttaaatgaatttctgtaaatttccattaaaaatacttttataaaagctatccactcgtcctcatttgaagcttccttctacaccagtactatctctttctagaccagggaagatagaaaggtagaagccatcatgcatgcttttgaaaacttagagaaaagaaagaagcggcgggatcagcccttggaacagagcaactctgatgtagagattactacaaccacctcagagactcctgttggtgaagagacaaaaactgaagcccctgaatctgaagttagcaactctgtttcaaatgttaccatcccaagcaccccacagagtgttggtgtgaatacccggaggtcttcccaagcaggggtaagagttgaaaagacttcagcacttagacatcctcacctttgctaatgtcaatacctaacttttggaatttttaaaatcagtgttttcagctttgctccatatcacaataaataaggccattaactgtttaactggaaccatttcattggcctattttataaatgcttattagaaataacgcaaacatttgtcgctagcctctttagctcatttaagtgtatacatttttgtatttaaaaattagattttaaattagtgtttctaatccttatatttttcatcagtagacattctgaatgcttaaagtgaataggaaattagactgtttgctgataaaacatttctggtaagcatctgaccctactattgctacaggatattgctgcagaaaaactagtccccaagcca

SEQ ID NO: 353 - DNA, 1904 bp, Homo sapiens
  source 1..1904: mol_type = genomic DNA
gggctggaaaaatcctggtgttttgaatatgttcaggtccagttcagactcttgatcccacagccacttcttgagtgaggtgggtgttgctctaattcccctgtttctcttgccattttcacagtccctggggattcttcccccttcagcaaagcaaagcaactgtaccagatttctgggttgaatgacatccctgattaataagtggttttcttccttaaaacagaatattattaaagagcatgtatatttcttcataaagccacctaatataacttacctgtttactgagttccttaaagaggaagacttaaagctaccctgagaaatagtatataatattctggggtagtctaaaatgaaaagcagtgtttgggcttattcccatataaaaaggagaaaggagggttgggggtggggaagggttgattttgtttcttctagagcttttttcttcttttgtttttgtttgttttgttttgtttgcatgcaaaaggtatttagttatgtcagtaactgagacttacttaaccattttacaactctttccccaaataaagtacttaaaactctccctgcattagtaggtagccagtttgtattgtgtttataggtttttataaagtcagctactaacctggtactatgtagattgtctaactgtatagatagatagcattaacatttgtgagaaatttcaacaaagaggttaaaccaatacgtttggaattgctggataaaagacccagagcagttaatcttacaattggtgttttccccaaagtatagacatgactgcccgtaaatactgctggggagtctaggactaattccagaaataaaaatacttctggtctacaaatgtgactgcgctgtctctgttaacaccaacatatcctaggatttcctgaaacattttcattcatgatctccagacagatttgtgatactgtggtcataactagctacatagttatgcatttctgcaaagggaaagaatgtcagtaactagctacataccattctgttaaattattaatgatatttattaatgtttcatcatgcctatttcgctgttctgggcactttaagattaaacctggtattaagtgcagcatactcaactagatgtagacttcacttcatagaattttaaatctgatggcaactatatgcaatacgcatttatttttgtgtgtgtttgtaggaaaatttgtagatgtaacaagcaaaacaaagatttttctgaatttccaactctaccataacagaatttcaggcattttccaagaaatggcatgatagcagctgggttgcatgttgtacttagaacactgttgatggagtatatctgttgtgagcctggtttctgtgtatgtgtccaattcagtgataggagaagaaagcctgtaattacatttgcataaagtggttggctgctaaagagatgtaattccattattccaaacttttaattcatattttaaaatataaaaactagtatatatatcaaggaatattttaggaaatcttgtagttacctgtaagtgtctaactgtgtattcaatcagtaaccaatatggaaattgcagagtttcttcatcagaagatatgagtttaaattttatatttggcatgcacagcaatatattaaatgctgtgcttaactagaaagtattgtgcagtgtgatggccttttaacctccacaatatacattttatttttattccctagacttgcacatgaagtgcatatgttcatatttacccgtttggagatgggtaagatacaaccagcatagctccatctccatggccatctttgatttcatgcaactttcctttttcctgtccccctcccaccaaaaaaaaatccattcctaataaacagctatcatgtttca

SEQ ID NO: 354 - DNA, 32765 bp, Homo sapiens
  source 1..32765: mol_type = genomic DNA
cttagccaggcattgtggcgtgtgcctgtattcccaggtactcaggaggctgagacaggagaattgcttgaacccgggaggcagaggttgccgtgagccgagatcacgccactccactccagcctgagcgacagagcaagactgtatctcaaaaaaaagatgtgaaagtagagattttaccctgatttctaacatctcaaggtttctccacatatttaagaaagtattataaattttcaagccagtgcagtataatagtttcagatgaaatgaaggggttaaataacagattaccataactccttaaataaataatagattaccataactccaaatggagagaaagtatggtttttttctctcttacggaaagttcatggtctttatgaaaaatccaaccagaagccttttcacacaggtgcgacacatgattgcagatgggatgattcacctgtgcatctatgctgtgtctgccatcaccaaggatgctgaggtcaccatagcatttgattatgagtatagtaactggtaagacctcagaaacctttcctaacaggaatatccatgtcttacatattaagctattcactctatttaaagtctgctcttgtttcttgccttttcctttgtttacttaatcttttcatgactaatgaattttctgcctagaaattgtaaaggaaaagacaggcaagattttttttagagatacggataccttgtatgatactgctcacaaatttcctgacagaagtgttttcgcttatgcctttttagcaagaatagcaaaatggatatatatgtatgtatgagacactcctggaaattacaatagcatcctgttgttatgcacagagtacttatgtcagggaccatatagaatgagaatttaggccaggcgcagtggctcacaggcctgtaatctcaacactttggaaggctgaggcgggcggatcacgaggtcaggagatcgagaccatcctggccaatgatgaaaccctgtctctactaaaaacacaaaaattagctgggcgtggcggcacacgcctgtagtcccagccacttgagaggctgaggcaggagaatcactcgaacctgagaggctgaggctgcagtaagccaagatcacgccactgcactccagcctggcaacagagggagactctgtcttaaaaaaaaagagagagaatttaatatgttacctctacttttaatttgtcaattatacccttataaagctaggggtgagatttaaagatccaccctgtccacagaaaccatgttatctagctgtatatgacagtgcagaaaaccataaagggcaattcatagatgaatatgtgggattttttaaagtatatgctttttgttctttggtcatttggggcaaaatagaggttatgtggtaaagtgatgtttggcccaggtataaggaaaaaagatgttctgcttaattcatcaaggaaaataaaaaaggttttaagaaggttataaaaggttttaagaagtagggaattagtaggtaaaagtgaggacatggtaatcgtgggcacaagatgagtatggccacatcagactttatcattgataaactgcctgctaaatagccaataaaccactggggggattgaatttagggagggctttcttttttttttcccactgaccatggagtagaattggggttacacaaagaaagacagaatattgaaagtgttacgtcaggcgcggtgactgacgcctgtaatcccagcactttgggaggctaaggctggaggatcacttgagcccaggagttcaagaccagcctagacaacatggcaaaaccccgtctctgccgaaaataaaaaaattagctgggcgtgtagtcccagctactcaggaggctgaggtaggaggatcacttgagcccaggaaacagagattaccgagagctgtgatgcaccactgcactccagcctagatgacagagcgagattccgtctccaataaaaagaaaaacaaaagtatttataggactctctaatgtctctgtttaacttattcagagacaatatcagaggaagttactgtactgatattttaagagggtgaatggataatgtaactgaatttcaagggtactgagacaggcattttggttgtttctttggagcagtaattataaagtggactgtgcctgtcacaagggaaaccggaattgtcctatacaaaaaaggaatcctaatgctacagaactgccactcctaccacctcctccaagcctacccaccattggagcagagactagacgtagaaaagcacgacggaaagagctagagatggagcagcagaatgaggcttcagaggagaataatgaccagcaatcacaagaagttccagaaaaagtaactgtatccagtgatcatgaggtaatcgcccctggtcaaatgatgatgctatggcatcaatcctccaaaggaagaggaacccgggttgccgcatggtttaagtaggggagctatagtaacacttagtgccctttatatcaatgtgggtttattgtgttcatacatttctttctgttttacaaagtcaaaaacatcctttgctggttttgcaccagagaataggggttagttatcatctgtgtttaccatgtggcctcacatgagttaacagtttaaagcactagagattgttatagagagttttaagctaccagaataaaacagattgattttttctcagagcttgagtacagctgaatattgcctctatcttaaaggaagtagacaatccagaagaaaaaccagaagaagagaaagaagaggttatagatgaccaggagaacctagctcatagcaggagggtgagtactgtctgacattactttgctccttctcattcctgctacctccatcatgtgaacctcttctgttctcttgactttgtatcatctcattgatttgacctgaaggttataatttgggctttttccgtaataaagattttattataatttttttatttatttttctctatacacacagtagttttgtagtgattattatctagtgatggtttgaagaggttgtttttttttttttttttttttttactaacaatctggtttccgctgggcgcggtggctcacgcctgtaatcccagcactttgggagggcgaggtgggcggatcacgaggtcaggagatcgagaccatcctcgctaacacggtgaaaccttgtctctactaaaaatacaaaaaattagccgggcgcggtggcgggtgcctgtagtcccagctactcgggaggctaaggcaggagaatggcatgaacctgggaggcagagcttgcagtgagtggagatagcgccactgcactccggcctgggcaaaagagcgagactccatctcaaaaaaaaaaaaaaaaaaaaaatctggtttccgaaaaactggctggtcagaatcaaaatgtattatagttggtttgctctgaattaggaattttctaggtttttgtgagttctgaagtttttttaaacccttttagtcatatgaactaaaattttctacttttatgctgaaaccaatcctgtgtgtttatgaccctgatttgatgacttttttttttttctttttgagaccgactcttgctctgtcaccaggctggagtgcagtggcgcaatctcaactcaccacaatctctgcctcccgggttcaagcaattccccttccttagcctcccaagtagctggcattacaagcatgcgccaccatgcctgggtaattttttgtattttagtagagacggagtttcaccatgttggccacgacggtctcaatctcccgacctcatgatcttcccacctcagcctcccaaagtactgggattacaggcgtgagccactgcacccatcctgtttttctttcatattaaagtttcaaaataactgaccctttttgaaaagtttatgtttgaccttgcctttatttacaactattccccacatttaaaatgaaatattttatttttaatcttctgttttccaagttatatgtgtcatcttactggtagttaaatgaatttctgtaaatttccattaaaaatacttttataaaagctatccactcgtcctcatttgaagcttccttctacaccagtactatctctttctagaccagggaagatagaaaggtagaagccatcatgcatgcttttgaaaacttagagaaaagaaagaagcggcgggatcagcccttggaacagagcaactctgatgtagagattactacaaccacctcagagactcctgttggtgaagagacaaaaactgaagcccctgaatctgaagttagcaactctgtttcaaatgttaccatcccaagcaccccacagagtgttggtgtgaatacccggaggtcttcccaagcaggggtaagagttgaaaagacttcagcacttagacatcctcacctttgctaatgtcaatacctaacttttggaatttttaaaatcagtgttttcagctttgctccatatcacaataaataaggccattaactgtttaactggaaccatttcattggcctattttataaatgcttattagaaataacgcaaacatttgtcgctagcctctttagctcatttaagtgtatacatttttgtatttaaaaattagattttaaattagtgtttctaatccttatatttttcatcagtagacattctgaatgcttaaagtgaataggaaattagactgtttgctgataaaacatttctggtaagcatctgaccctactattgctacaggatattgctgcagaaaaactagtccccaagccacctccagcaaagccttctaggccccggccgaagagtcgaatttctcggtacaggaccagttcagcccaaagactaaagcgtcagaagcaggccaatgcacagcaggcagaattgtcacaagctgccttggaagagggaggaagtaacagtttagtaactcctactgaagctggaagtctagacagttcaggagaaaacaggccattaacagggtctgacccaactgtggtgtcaattactggatcccatgtcaaccgtgctgcatctaaataccccaaaaccaaaaaggtaagtcacaaatgcatcctttataagtccagtctggcaagggctgtcttagtgaaatgagaggacctataatccctagaagaaactaatctcaatattactagattgaaagttctaaaatgctttgacacaaaaggctggagtcatcctgctacctgtttccttatttttagtcagcttaaatcactgatagctgaaattattcctctcttagtgggcgtggagagggtgaaggaagatatccttgtgttctagttgctcaattcattcttactgcagctgctgcatctcctcctgtcctagtttctagatgacgtttgtctttatgaactacactgctacctcttgatttataaactaatgatctcttttttaccttagtatctagttacagaatggttgaatgacaaagcagagaagcaagagtgccctgttgagtgccctttacgtatcacaacggatccaactgtactggcaacgaccctaaacatgttaccaggtcttatccattccccgttaatttgcaccacccccaaacactacattcgctttggctcaccctttatccctgagagacgtcgaaggccccttctgcctgatggcacattcagctcctgtaagaaggtatgtctgtgtttttgtgtgtgtgttgtgtttatgtgtgtgtgctttatttttttaagcctaagattcctatcatcatgacataaataaaatgttctctagatagccactctgcccatgtgagtttataatgagttagttgttcagccataaatactgattcatcaagagtctgtgagactgtggtggaatgaatgtactgcatttttagtgctcagatttgtgactggtcactgatgtctcttctgagaacccttgaggttcctgagtgagagcacacagcagtggatgactgggtagagacggatatgttttgtgtgtgctcttgtgatatgggttaacatgtccatttatgattattgtgtgagattaggccctgggtcctctagaacactgttgcataaatgaaaaaaattaaattgttttgaatcaattcaaccgttattatccactatcatcacttgaaggaaattagaggaaaaatcctattgtaattggcataattcctgttccttgatcaaatgacaagtcggactgtttattccaagagaatacagaatctaccctaaaagactctctttccctctctgtttctgcctctttctcctctttccagttacttactgtttttggatctagtggcagtagcgtttggtggtgtttttggaatgctctttcttaattcccagaagccctgcatattttccaaaggtgtctcttaggaatagatcactccctcagatctatgatgtcgttttccatgtttctagaagtataggacaccctttcatttggtcttcctttgaggtagagtctgttccctggaacacccttttctcttatcctcagatctggattcaggctgccttcctcagtgtctgccattgccctcctccactggcatcacgtacatgaggatgctgcatgtagattatttgatgtgatgaagtctccaactccaggcaggtcttccctgactcctccaaacttaaaagcttttctctttccccaaagaacagaagttatttctccgggggaggggggcatgaaagatgagccaaagtggtgtgggatatggaggggaggagggcaataggaatctgcaaaaaggaaggacactactgctgaatgagcagcacattgcagaaagtcttttcctaattgcacatcttacctaaacattggaatcactcattggtttgttcggggaaacgctcgtagaattcctaaagagaaatttgaccatttctaaggatgttaactgttgaagcatcttatcaagccaggtcgtacaatctcctattttggtcctttaaggagtgtaggcaattatttattacagataagtaatgaagtctgagctgcaaataatatgaactaggctcttgaattgaaattccttcttgataattctaatgctgggttgcagtctttctgtttccatcttttccaactagcagagacttaacgaaaaccaaaaacgtgtctaggactgtaacttcagatctggtagaaaatgcatttctttaagcttttttaacttggttctgcttttatacttgtatctatagcacatccttaaatttctacgggcaacagatagaaattccatttaacacaagtccctgttatattctccaagtgtatctgactatccttaatctcatttatacaggctctactcaagcacttttatctatgtgtcatggttagtctttaggaagagtttaggctgcatacacaggattatcataacaagactatttaaataggatctttaaaaactgtttaagtcattgctttattgtgtgctgttcacatatcaagattctattttttaaaatacagctttttatgaggcaaaataaaatgaaatggaatgttttagctagaatagaatttggctttatagcagtgaagaagagttcttcttctaatattggtcttcttctaatatctcctaatattggttagaaaggacttacctaatgcagaacctaagaacattttcattattcaacaaaattgtaataaaattctgaaaatccctcagagtataagttaatcagatagataagaaaaccctccatgggattatttagaacaatgtatatttctaataggctcactgtttcatatctcactaaagaggtaagggcctggccttgtaagttaaaaacttaccagtataggacaaattaaagttgtatctgtatagttgtactcagattcttatgctatttatttttatttttatcattattattctgcaacttctgaaaagaagaggagttcaggtatttgacagaacattttatgatatccctagagtttctaaattgaatcatagtttttaagaagcattttgcattttttagttcctcagttggtattttaaaaacatttataagtggccaacaaggctctcagtagtgtttcaccttgttctctctaaactcctcttctaaacacaatgtgtatagggcatttggtctccagacttcttagaaaaaccagtctgactgataatgaaacagtgtgctttgcattgataattaatatttcattttatacactggagcattatctgtaaatctccaaacatagcattgaaatttagttgaaccgggactcggtgaaaatctgctcagtgttcagtactgtactataagctttcttcacatacattatctcacttaccatgcatgaaattgggatcattgtcctaaatttatatatccagaagctttgtctcagaaatgtttggtaacttgtccaaagtgaagcagctaataagtgacacagccagatttcttctggtgggggatagtaggggttcacagggtctcactgttgtccaggctggagtgcagtggcatcatcacaggctcactgcagccttgacctcctgggctcaaatggtcctcctacctcaacctctcgtgtagctgggaccacaggcacaccaccacgcctggctaatattcatattttttgtagcgacagggttttgctgtgtttcctaggctgatctcaaactcctgagtgcaaggagtctgcccaccttggcctcacattctgctgggattacagatacgagctactgagcccagcctcacagccaagtgtcaagccagggcttctggactccaaaacctgtattgcttccttgctctttcgccataatagcgagacctttaaaatatttatccatctttgagcctcccagaaaactcctttgcaatatattttaatagaggttcagagaagggagaaatgttcttttgattttaacaacttgctgagtaggtgcatctaaaattaacttattatccatgaggttaattgtatcttgttagatacaaacaaatgtccatgttccttttttatatgagtcctgaaatattgtaaaattatacaacagaacctggaggagtaggtttgattgtatttgctgtgtttcacctcatagctaaccatggtagcatctttcttctagaatactcctgttctgattttatgttccctttttgtagtcatcagatccagaatgtaaattattttacaagtacatctactagaccctggaaatattaaaaaattactcagataggaaagcttagtgaccccaaatgagtgttttctgctttgaaaagaaaaacttaaaggtggccataacaaaagatttttcactcctgagcctaatttttccatttataaaatgagtgctttggacaagatgacttctaagttctcttctaagctttaaggctatatgtatggttctgacaattcatctttacatcattattctgtatctaagatagttcattcttcggattttttattttgtttttgtgtttgcttttcagagacctggttgtatcctaaaatgtttacgtgattcaaattaccattgagagctcttttttatatccttgttcactcttccttccaagtgtttacaggtttacagtttcagttttgctttcatttggccagccacaatgacatttgtatgatgtaagatttttttttttttttttttttttttggtaaaatttttgtggattgtttcctaggtttctaagagggaaaatctatgagaattgctctctggtgaagagagtatttacttacctgtaatacatgttctctaaaggtataaattataataattcacctttgctcttcctattgggggagggtcttactcagaaattgatgtttatcaaaattcgatctgtcttatgtcagggcaggagagccacagagtggtgagcaacctacaactgtatatcttaagagaacacaattacaggtaagaaattttctgtcttccacaggatacataatcttattatcctaatctttgcaggtttactatctggcctaaatttatttcttgtcagtttattattctaatctttactaccaaaaacttgtgactgataggtcttctttttgactttttcccttttttttgatttctactgaagctcatttcgtgatttgcattactcatgcataatttaaccaaactacttgttggaggggggagtcccataggttatttcatttgaaataaaccttttggaaacgcttttggtacctgtagtgaagagctattaatcctcatccaaaatcttccaatgaatcttttttattacctcttcacacgtctctagcacggggcagacaacttttaagagatctttatcttccttctaggcgcttattttatatattagttttattctatacgatcacagtctctcctaaataaatgttaagatttcttcctcagtcttgccattttacaccatcccaaatggtatgaaaagttgaatagcagtcattttttattggtttttgtcttttgatgggatctcattatatgtaatccagatttcctcaagtttttcagttaaaaggaattgataggacaatgttccaatatgctgagacacaagacaataaaatgcttgactgtgtaactgaattagtgtgttgaattgtatcactcaccagttgatgtacatttaaaacaggtgcactaaatagttttagataattattgataattctctggttcttttcaattatagcgctggataaaacaagccttagaagaagggatgactcaaacatcatctgtaccccaagagactagaactcagcacctataccaaagcaatgagaatagtagctcttctagtatctgcaaagacaatgcaggtacgtatctaaaacctttctgattatatgaccaatgattgtttcaggtctgcataaaaaatttaagtatgagtatttctgatacaaaaagaaatggcgtgttttctaaatagttactttacatctgtctttacagaggaagagagagatctcaagtcagggatcagttttcccaggacgacaaagaaggactagacagtgtacagataacagcagaaatggttataaaaaaggttagatacatttaaagtagtaagtttaggaaatttatattcatatttataagatggggcaagggcaagaaagtggtggaacactaatattcaggaaagaattaaaattctgagtgattaagttgggtgggacatggttgagggagcaggggatgaatgaaataagtgaaaaattattatcaattgattgttttcaaaggggcttgtataattagcatacaatttttaaaagaacagccgggcgctgtggctcgcacctgtaatcccagcactttgggaagccaaggtgggtggatcacctgaggtcaggagttcgagaccaacgtggccaacatggtgaaaccctgtctctaccaaaaatgcaaaaattagctgggtgtggtggcaggtgcctgtaatccctccctaaacaggaggctgaggcagtggagaatcacttgaacccgggaggtggaggttacagtgagccaagatcacgccactgcactccagcctgggcgacaagaatgaaactccgtctcaaaaaaaaaaaaaaaaaaaaaaaaaaaacaaattttttaagacagctttaaatctaaagtctttgtgcatttttaaactagatgtcaatgaaaaatcatctgttccattggttttgacagtgacttgcaaaggatgtaattgaaagcacttgtgatatcttaatgtattttgtgacaatctttttaccagtttctcctgcaaatatcagcttaattgaaaagttctttgtgattttcataacttttctctaaatcagttttttaaatattagacaatcaaaataccaaagtaaattagatgctaaagcaacctttcaggttgcaacaaacagaatatttcacattttcataaaaaacccacttcattgttcctgtttaccaacttgctgaataaatgtaatgaacttgaatttaattagataaatttttagtagcagatattgcaactaaaatcagaacttttcttaaagttcttacttcatttggattttacttctttttagattttatttcagaaaacgtgaattgcctttttttctttttttcttttttttttttttttttttttgaaatggagaatcaagcgattctccctgcctcagcctcccgagtaactgggattacaggcgcccgccacctcacccggcaaatttttatattttgagtagagacggggtttcaccatgttggccaggctagtctcgaactcctgacctcaggagatccgcccacctcggcttcccaaagtgctgggattacaggcatgagccaccatgcctggctgtgaattgccattttttaaattatggatttagtttattcttttgtctctagattagattatacctcataagttaccacctatatacctcaggataataaaattccagttatctgaaagataaattatactgtttatttaaaatattttcttctagtattcaccaaaaattagggatatttagtcaaatatgaatagtataaagaaatcttggtaccagatttccatttgtattatttcttttttaacagcttttaaggtgttagtaagaatataacttagctgaaatagactatcatgtttgtgtatctatctggtgtgtgtgttaatgcatgtgtatagttaaggttgggaacaggagattgcatagcagttcacatcctgactagcaaaggattataggaaaagtgtctttgttatcacatgccctggttggaaggaaattaggattcctagtcaccagccttttttgttattgttgagcttctgccctagtctaacagtgagaaacactcacaggacacaccttgcccttaaaaagcaatgtaggaaaatatttgattttaaaaatcaagcagcagtcaaatgcgcaagttatattgctacaaaattagcataaattctgaggaattacttttatttgttggctctcttttgtttttttcaagaataccaaagagacattaagaaaggggaaaggatttctataatagaaaaaatcaaacagacctttacttgaaaaccagctgtcccctttactaactatatgatgttactagaagtctctgaggctaggcgttggtggctcacacctgtaatcccagcactttgggaggccaaggtgggcggatcatctgaggtcaggagttcaagaccagcctggccaacatggtgaaaccctgtctctactaaaaatacaaaaattagctgggcctggtcacgtacctgtaatcccagctatttgggaggctgaggcaggagaattgcttgaacctggaggtggaggttgcagtgagacgagattgcgccactccactccagcctgggtgacggagggagattctgtctttaaaacttaaaaaaaaaaaaaaaaacaagtctctgagcctcatttgtaaaatgggaatagcaatacctgctttatagagctaacattagaatgaataatgtatataaagttctcaatatagtatcaggcccataagagtaattattatacggtcattattctacacagaatactctttcttgtagagtatttgtggattaataaatacattaaagattctggctgggtgtgatggctcacgcctgtaatcccagcactttgggaggctgaggcgggcagatcacgaggtgaaaagattgagaccatcctggccaacatggtgaaatcccatctctactaaaaatacaaaaaaaattagctgggcatggtggcatgcacctgtagtcccagctactcaggaggctgaggcaggaggattgcttgaacctgggaggcagaagttgcagtgagccaaggtcacgccactgcactccagcctggcaatagagtgagactccgtctcaaaaagaaagaaagaaagaaagagagggagggaagaaagaaaagagaaaagaaaagaagaaagaaatacactaaatattttaagttcctaaaagctgaaactttatagaaataaaagttattatcaaagtagggcaggggcatgatgttcattatttgtaaatgatgtgggtctattcttagaagagcctaagtaatcagctgaaaaacttagaattaataataagagtttaggccaggcgtggtggctcacgcctgtaatcccagcactttgggaggccgagatgggtggatcacaaggtcaggagatcgagaccatccttgctaacacagtgaaaccccatctctactaaaaatacaaaaaattagctgtgcgtggtggtgggcacttgtagtcccgctactcggggggctgaggcaggaaaatagcatgaacccaggaggcggaggttgcagtgagctgagatcgcgccactgcactcctgcctgggcaatagagtgagactctgtctcaaaaaatatatatatatactaataataataataagagtttattaatatcactggatagaaggataaatatataaaaagtgtaaatatattttaaaaaatcatttatataccaagaaagtaaatgaataccaattttttttgttcccaaacttaacaaaactaagaaactgcctaggaataaccttagttgggtatatggagtaaactgttactgagaaatatttttaaagtctgaggaaatggaaatttctttttctttttttttttttcatgaatcatacgtgagcctttgataaatttcatgttcattatggaaagaatatatatatgtgtatatatatatttctttctctttctctctgtctttatatagttcccatgaaactgccttgtttttggaatttgattaaatgattctgaagtctacctttaaaaaaataagaaaaaaattgaaaaaataataatgaagtactttctcttgaggtgtaagacgagcttctagtatgaagctaatagttaaatttagtataatattgatgcaagaatggatgtatatatggaacaaaatagtcagaataggcctaaatataaatgtaaaagttggtaaattgtcatggaatttttagttaggagattgaaaaagaattagaatctagctggacacggtggcacgtgcctgtaactctcaactacttgggaggctgaggtaggaggatcactcaagcccaggagtcaagttcaacctgcgcaacacagcaagaccttgtcttcaaaagaactactaggtcctttgccaaagaaaattctaggcacattcaaatatatatatttttttaattcaaacttgggcctggcatggtgactctcacctgcaatttccagctctttgggatgccaaggcagaaggatcacttgaggccaggaatttgagaccagcctgggcagcagagagagacccacatctctacaaaaaataaaaattagccaggcatgatggtgggttgcctgtagccttaaggaggctgaagtaggaggatgacttgagcccaagaatttgaggctgcagtgagctgtgataatgccactgcgttccagcctgaatgacagcaagacatctgtctctaaaaataataaaataaataattcaaactgtattaaccatgtttttgtgtctatactgcctctgtattaatagaggattagtacattggggaaaggatttgcagtaaaactgccggggagtaatatccctgctagcaatctgataaaatttatcatgtgcattaaaaatattcataatccttaacctagtagtcgttcatttgttctgcttggtatctttcctacagaaatagacaaagaaaccaaaatttatatataaggttggtgcaaaagtaattgcgtttttggaccattaattttaaatcactgtaactagactcagacacatctttattaatcaaaataggaaccactgcaatcaacacatttttgccactgagaaataagtttgtttattcctgtagcctaaaaatctatgcttcaggattcgacaaactcttggaaaatattttctgcatcctgctggttgtggaagcaccttccctgtaaaaagttgtcagatgcttgaagtggtacctggttggcgagaggtcaggtgaacatggcgggtgagacgaaactctgtagtcaaatttgttcagcagcttcagaagttgaatgaattgtttattagaataattaattcttagttattaacaattgcaaaaactataggttaaaaataatctgaattccaaccccaggaatggtagaatttgtaattttatctgcttgtgcacatacttgtaatggagtatcatatactatttattgaaaatcttatttttgattcattttatcaaattaactccctctacccccaaaaacagcgtagtaccacttttgaattagatttgtgatcttacctagcaccttgaatttgtaagaatattaaaagaatagccaggtgtggtggctcacgcctgtaatcccagcactttgggaggccgaggcaggcggatcacgaggtcaggagatccagaccatcctggctaacacggcgaaaccccgtctctactaaaaatacaacaacaacaacaaaaaaaaaaaccgggcatagtggcaggcgcctgtaatcccagctactcgccactgcactccagcctgggcgacagcgagactccatcaaaaaaaaaaaaaaaaaagaatattaaaagaagaatatacgatgactaaggttccttctaggaatgtaaggatgagttaatatttgaaaatttaataatcgtcatttgttagcaggtcaaatgggggaggagaagtcataacacagtgacttttatcaatttaatgataaaataacatactatgatcttttaatatctagctgaaaaattgccagttgtcatgcatcatgaaaactagttaaacatcaaaataggctatcaaattatcccactattaccattattatttaatatagtctaagtaattgttagccaaagtaattacaccaaccccctcccccccacaaaaaaaatcaacataagagatataagtactggtaaagagggttaatgtgttatcatgtacaaatactattatctacctagagagttaattgaaaaactggtagagattaatagggtaactggataaaaaataagtatgtaaactttttaaatgttaataacatttagataacaaagggagagatacgttttattcatagtagtaaaaaaaaaaaactaaagaactctggagagtaaacttaattagacatgtggtatatatagatgaagagggacataatatgtgaataacaaagattatgccatgttcctgggtaagaatgcttctcaaattactcctgaatttcatctaacaccaatcaaaatcctaacttttttttttttttttaatagtatgagcatggtcattgaatgacttctatagttcattgctagaatagctaaaatattttggagaactagaacagaataactggaatttccctaacaattttaataaaaagtatgctggtgttgattcagtattggacaataagtggaaagaataacattcggaaataaacattcagaagataagcccagtatatgtaagaatctaataagataaatatatttcaaattaatagggaaattatagttattctacatttacagaagattttggaagaaggtgctggctatttgttatggggaaaggatggattaattgctaccccatatttaagtatgttcttttttccttttttgtaatggcagtttgtcagtgtgaaataaaatgttcttttttaattaaaatctaaattaaaaattaaacatggagacaaaaggaaaataggctggcatttttacagtgtcagggtgggttagcaaagacatgatatcagaagcagaaaataaagtgatccgtttgactaaatagaaacaaaacatatagcagagacttgtaaataaaattgaaggcaatcagtaaactgggaaaatacatttgtaattttattgacaaggggtcaacattcttactatttaaagagcccttacagatgaagaaaaagaccccaacacctcagtagaatgcaggctgaagaacatgagccagcagttctcacaggactaaatataaactacacatatatagatattcttttgatttaataatcctacatgtagccatttgttctaatagcaaaaaatgaaaaaaaagttggttaaattttgataatactaatgttgtgcagtcattaaacctgaactgtagatttctattcattgtcataaaatgttgaccatgtatttctgagtgaaaatagttactgagtagtttaggtaaggcaagagtcagtgaagcaatgtctcgataaaaatttaccaggatattagcatgcgtttatttgtggatatgattttcaggttgtgtatgtgctgtataaccttggtaattttttgagtaaaggtgaaaaataataataataaaagatggatagatttgaccacataaaatttggaaactatatatgcaggaaaaagagaaaaagtaggcaaatgacttggctttctttggcctgtaaacttcttaagggcagacatcaggtctcttgttgaatacagtatcataataagtactcagtaaatatatgttgaatgaatgccttgtacattgatttgcacgtggcagatttcacctgtatcttataactcctttctacaactaacttcatcacttaacataattgactttgatagttatagtgttggacctagcagtacagagatctgtaagattccattgtttaagacccttgaaatattaaatatataaaagttattccgaatataagccatgaattacatgtttgtttctgttttatacctaggcactttttaaaaggaggaaagaaaatttagtatctggaacaaaaggaagatgtgaatatacttccaatctaggaatattaaaaatcctgagatatcagaaaggaaaaatatgcatcttcaataattttttgcatttattcttccctcttcatctaaacatctcctaccctagtttagtgcctcataattctttgctaactactgtgttaactccagatggtttcccagttactagtctcatactgaccattgcttccagataatcttcctggcccaaaaattttccttgaaggcctggaataaatgtcactccttccatccaccaagccttggggatatactttaacctattgattaagaatatagatagatggagccaggcgcggtggctcacgcctgtaatcccagcactttgggaggccgaggcgggtggatcacgaggtcaagagatcaagaccatcctggccaacatggtgaaaccccgtctctactaaaaatacaaaaaattagccgggtgtggtagcgagcacctgtagtcccagctactcgggaggctgaggcaggagaatggtgtgaacctgggaggcggaccttgcagtgagccgagatcgtgccgctgcactccagcctaggtgacagagcaagagtccgtctcaaaaaaaaaaaaaaagaaaaaaagaatatagatagatggggccaggcgtggtggctcatggctgtaatcccaacactttgggaggctcaggtgggtggatcacttgaggtcaggaattcaaggccaacatggtgaaaccctgtctctactaaaaatacaaaaattaagaatgtagatatatgggagcaagaatacctgttttgtctctctccacacatcaagtttctcacctttaatatggggatgataataatagtgcttgatttatagagttgttaaaattagatatttcacaataaagcacatggcatagtctgtggtatataatcatcatttagaaaatacagcttttttttttttttaactaacacatagcaatatgatcacctttcttgatcatgctaatactaatgtgttcactttttttgttgtgtcgttttgttttgttttgagacagtctcctccctctgtcacccaggctagagtacagtggtgcagtctcaactcgctgcaacctctgcctcctgggttcaagtgattcttgtgcctccacctcctgagtaactggaactgcaggcatgcaccaccactcctgcttaatcttttttgtgtatttagtagagacagggttttgccatattggccaggctggtctcaaactcctggcttaagtgatctgcctgcctcagcctcccaaagtgctgggattataggcatgagccaccacacctggccctgtttctatttcttacaaattttaagcctcttgaaaatagaatgtatgatgaccatttttcccttcatacctagttcagtaatcagtaggtattaaatatatatacttttaactgtaaatgaataaaactgtatttttattctgagaatcaagtgagaaaggtgctttgacctaaatggtcactaaaatatttagtgtagtgacttgctttttaagtggatctaagaagtacagaaaataggattattctagtcaaaaagaatgtgaacctaattttttaatggttgggagaagtttttgtagaaatcatttcatgctttttaggtagaaaaggggctagacatggatcaaggaatcatataagaatagaaagagcttctgaaaagggacacacatatataagagatggtgaaaggaatttggatttagcatcccagtacctttagttggtgatatagcagtttagtagagggtaactgtaacacagtaacaaagacttttcagaaactcaatgtaaaagaaagaactgtagcagtggctcacgcctgtaatcccaacacttggggcgtctaaggcgggcagatcacctgaagtcaggagttgaagaccagcctggcaaacgtggtgaaatgccatctctactaaaaatacaaaaattagccaggtgtagtggtgcatgcctgtaatcccagctactcgggaggctgaggcaggtgaatcacttgaacccgggagacggaggttgcagtgagctaagtaaatgccattgcactccagccttagcgacagagcaaggctctgtctcataaataaataaatgaataaatgaaagaattttatattttgcactggtagaaattaaattagagatcagtcacatttgatttacctggagtttgggagatagaatgttttcagagttattttaagcatggtaattaaagagtttctttgggattttggttggattggaggagataacttaatgggatgaggcagaaaacagttaagagccattgtagattacagattaatggctttactgtagagccttaaattaatctgtggtttcaaactctcatccaagctttgtgtttcacagacttgttgagcccattaaagaaatggaagtctcgctatctgatggagcagaatgtcaccaagttacttcggcctctgtctccagtcacaccaccccctcccaattcaggctcaaagagtccccagctggccacacctggctcatctcacccaggagaagaggagtgtcgaaatggatacagcctcatgttttcaccagtcacatctcttactactgctagtcgctgcaacactcctctacagtttgaggtgatttgggtttggttgctgggagtgctggatatgaaaatcatcatttgtaccttctcatttcaaatataataccattccaaatgtttctttactatctttcttccccatctcagtaagagaatgggaaacctcagggtcattgtggcctgttacctggtagcctctcatcttggcagcccctatgcttcccaaaataggcatactgctaccacaaatcccattcatgtatcttttgcatgcagtccatcaatctccataagtttaggtagtaagcatgctagatctccatcgttatctttactgtatactttggtcaaaataggcctctagctgcctgtagtatctgttagtaacactagcctgagagcacagatgatattgattgattgtgtcttcgtttctaggcctttaaataagtgaagtgtctttcccaggttgtttggtattttcattgtggccttagcagagatttagaaaacattggggtatggcttatggcgaatgtgggttttttccactccaggttactttccctctttgttataatgtcttaggaatcagaagtagacaagaggctagcaacatgtattcatgagacaaatttattaccttcactgttggattaagttagaaatgtctgcctcagctgtttcaaaaagtaatcttgaatcactttagtgttcaggtttgggtgacagcaggtttcaatagaatccatgtatacttttttaaaacacttcatctattgcatgttactttgatttgtaattaaaatggacactgtctcttttttccttctcagaaaaatttgttctgaccactaaacacactctgctgctctgcccccttgtttgcacttctccagatgtgttttttgagaaaggtgaacattttaaccaatcttacgtttcctattcagcttttccaagtatgaggattcagaatacttagcttttatgagtaactaagaggcagctagcaacattgaaagcagaactgtattctttcttaccctagacctctacttttggagcagacctctttctgggtgagggaaaaaacctcctggttacatatcagttatctagggaaattactctttaccagattatttatgaaattctttcagccagataataaagcagctgattcaggcctttctaacttgactttgtctacttgcaattgactttgcagtttgcacctagagctttatagtaaggtatcatgagaggaattctccctggagggcataagattataggaatagagtgtcatactttatcaatacaggttttattataaatgtggaattatgaaaattagaaggaggccgggcgcagtggctcacacctataatcccatcactttgggaggctgaggcaggcggatcacgaggtcagtagatcaagaccatcctggctaacgtggtgaaaccccgtctctactaaaaatacaaaatattagccgggcgtggtagtgggcgcctgtagtcccagctactcgggaggctgaggcaggagaatggcgtgaacccgggaggcggagcttgcagtgagccgagatcgcgccattgcactccagcctgggcaacagagcaagactccgtctcaaaaaaaaaaaaaaaaaaaaaagaaaatcagaaggtaagtcactttgcaaaacaagcgggttcagtactcagtgtgttccttatcccttgtagcatttgggataactattaaacactgcaaatataaagtggttttggttttgttttgttttgttttttttaattggtgatcattttaataatacagtccatgcataatgttagaataccaggagggaaggaaaatattaaatagtaaaaggtccaaggcatggtttcacttgcaatttaaggaaattttacctttctcatcaataatagaacagatttcaccaccctgacccattctaatcaccattttaatggccatactctttgctgtattctagtacagagaggtggggagccttttttgtagcaaaggctgtgacacattgtgaaatatcaaaaaggtgtcacgtataaagaccagcttaggctgggcatggtggctcacacctgtaatcacagtgctttggaaggctgaggcaggaggattgcttgaggccaggggtttgagaccagcctgggtaacatcgtgagaccacatttctgcaaaaataaaatacaaaacttagccaggtgtagtggcatatacctgtagtcccagctacttgggaggctgaagcaggaagatcacttaagaccaggagtttaagactgcagtgagccattattgtgccactacatgccagcctgggcaacagtgagatcccatctctaaaaataatttaaagaccagcttaggccaggtacagtggcacacacctgtaatcccagctactcgggaggccaaggcaaaggaattgcttgagcctgggaggttgcagggagccaagactgcgccactgcattccacattccagcctgggcaacagagggagactctctctcaaaaaaaaaaaaaaaaaaaaaaaaacaaccttactagattagtttggggaaggatatttttgagaaggaaaaaagcattcaggaaaatggtgagaagtcttaagtgctaaggggaagaaggtaagaagataaacagtggaagagaacaagatcttcaggaggggaaagcatctagaaagaagagtggaagcaacattgggaggacaagcttagttagcctctcctttctaccagaataaccctcccctcctattcttgccctgagagccatactccacccgccatttcacacatacgtgcacctagatgtacaccacccactgtccatgccaagtaaaattcacagccaaaaccctgctttgctgaagcagcctcatttcccctacctcagcatgtgcctgccacctaggccacagttattcagagtctacattaggcaccctctccttacctcagccctagcacccctgagtcattgtcacactaccaccttcactctcttcacgtgttcccatttacatctttccattaagcactcactgctcagtctctgttatgggactgctgcctcacctgaaagtcccaaggtaaagtcctaccctctgtaggatacagggacctaagtatacacatacatgctttttctgctctgttgccaaaagtacaatggattttacaaaataacattaataggggtggctcaggtctaattagattatgccaagaaccaactctagcctgtgagctagggattccatcaatcacatttcctgtaactgtcattcaagaggaactggccatctccctaaccatgtcagcccccagcacactaatgtctccccctggatagcactgggagggcctgaggcatataagagaataaagaaatgtgacaagcagaagaggcattggatgaaggaacaaggtccatgtaaggaggaataaggggtagggtgcccctcaataacaaatactgtaggttgctaaactctcatctaaaatacaaagacgtataacactaaaatttcaccagtctaactctttccttgtatgtgcttgagatgtttacttacagcatgaaacattataaccaatttatccttaaatgctttcagagataccaggaagcattttaacaagtcattctgtccattgagatgagttctgcagttaaatatttcccctatgcattcttattcaacttccccgcccccgaaaaaagttatggctaacatctatgcttgcttttattttttgttttgttttgcttcttgacttcgagtagatgaataataacaagatgcttttccctcctctagaacatatcctcccctgagagttcccctgcgcataggcccgagtccctgtcacccgaggtagttatcacaccatctcaatcacacttggaggctgagagtgagtgttcatgaatgtgttcctgagtgtgtggggagggctggggatctgagtcagtggggtgatgggctggagggcggccactcagtcacagtaagttgaatgagtcttcctgtgtgactgtgactacacaggactgtcaatgtagatggaggaaaatgaaggtaggagcgtgtgtgtttgtgtgtgtgtgtgttgtgtgtgtgtttggtggggttggtttttgccgtttgggggagggggtggctggagttctattaaagaatagaatctagaagtcaagatgctgatatgtggtaggagccttgttaaagaaaggctaataaatcaggaaagttgagtcaaaagttgtaagagctgttttttgagttgggtggtgacttatgccttgttctagggttaatctaacagctctgtaaaccagatgttttgacctttggttgatagattgagcagcttcttcaggaagggaaagtcattctgtctttcagctttcctacattttctctgcagctccttactgggtgcacaaggaaaccaagtgagtccctggctttctgtcacaggccaccattctgcaatggttaggatatggttgctatacaagtgttatctctttaggatatcagtagagtggttttctcacaaaccctactgctgtggatatgtcaaactcagattttagtgctagagtttctattataagctttcagatttagtaacattaactctgaatctattaatacatgggaccttttttctcttgaagagaaagttagagtctctcagaaatagtcaactgaactttaaccctatccccttccaataaaaaattagggcataattcagtgacagtctactaagttctgaatcagtagtagttcacaggttaatatgaaactgaaaaaggttttattccactagtatattagagattttcttggtgttttgactctagcttgttaggaaagtaaagctctctctcctcagttgttaaagattctaagataacgtaatttgaagactgatatggtatggtatctggttttctggtaccattctttgtcggttagctgtagttgacctagtgttggaagtttggaggttatgataaccaaatagtaggtggggtttatttttggtacatttcagcatttcagaatctgcagtgatgagcattagtggtcttgtggtatgttgacgtacattagaggataaagaagaattgagtggccagaaagttgtatgagaaacacagcttctttaacagtgaaagtgagtgaagaactggttggttgatgtctttaatgccatcctcctttactgaaccagtaacttaagtacttgcctttccgtctaccttctccttcctccacctttttcccttccccccaccttccatcaatattaatttagaaattgataaccccggaagccagttatcttaagacaccagtctcatctttgttttgtgcatggggctaaggtaaattcctaattataccacttgtcccttagtgtagtacaaggtgactcagcaacctgatgaaaggctaagcaggcaaaatagtcacatttagccaattacctaattctaactttcccagtatttcccatccagaaagacttgaaagcaattttggaaaggccaggattctttagtactctggcccatgtacactgttgctacgtgggacttttacagaatataatggctttatctgctctacttccgtccctcttatctttccctgttcacctgtgtccctctcccctcctttctgccctttgactttttcctttctcccctaccccatgtctccgttgatttttattctttcagctttgtcaccgaaaagacctggatttggcaaaagtaggataccttgactccaacactaacagctgtgctgatagaccttccctactcaactcaggtcattctgacctggctcctcatccctccctcggacccacttctgagactggtttcccaagcagaagtggagatggacatcagaccctcgtgagaaactcagaccaggcatttcggacagagttcaacttgatgtatgcctactcccctttgaatgctatgcctcgagcagatggactgtatcgaggatctcctctagtgggggataggaagcctttacatttggatgggggatattgttcccctgcagaaggattttccagcagatatgaacatggcttaatgaaagacctctctcgtggatccttgtcacctggtggtgaaagggcctgtgaaggagtcccatctgccccccagaacccaccacagaggaaaaaagtaagtgtttcatgttatatcggcgaacttttcaagaatgttaaccaagtagtttagtagatattcataagtttctgctatgtgttccgcactactctcagacaagtgagacatagtctctgccaaatccagtgaaagacaggctgttttagtacaacttggtgaatgttgtaaatattcagcaaatgtaaatgcctgtatgtgccatatacttgctaggcaattgagaggttagaacagtgaaaaagaaattttacctattatttagtgtgtcccaagttcgaggcactgtattaagctctttaaatgtgttttatcctcacagtaagcctataagataggcaattttctattttgcacatgaggaaactaaggcaagttgagtaactttcccgtggtcacacagctagtaaatggaaggaccaggatactacccagtttgagagagaaggctggagtgagaggcagcaggttactgatttaactgaatctcaaacaataagtaggagtcagccaaccaacaattgagggtgaggtatgttacagtagagggagtagaacaggtaattaggtggcactccattggccaggcagcaggcatgcagtatggtgcaaacagttggatgttgttgtatcaggtggaaggccgggggagccaggaggaaagtgcagagagtgctgggctgggccaggccatagagagcttgctaatgggttgggactccacttccaagtaatgcctgatcaagaagtcacaaagccaaaaatatgcttttgtataagtggttctcaactaggggtgtttgagaatgagtaggagtgttttgaattgtcccagtgacttgcatttattgagcagggccagggatgctgaatgtcctgtataggggacagtcccatgtaatggccaaacatctgtagtatcctcattgaaatgaaacctagtggtttttttatattttcattataatgatattaccagaatttattaacttctttccaaaattatttctagaaaatgcatatgcaaaactgtctatatttttgttccatttggacagaaaaatgagaaccctaaggggatagaaggaggaggaaacattggcagataatttggattaagataataattgatttcgaagattgttgcgtgaacagcattgactaccagaaacaaacatgaaaacaatctttggatttctggttttataatatttactatgtgcaaaagtcatagaaattatgatattttatttcagaaacacttctgaaatttattgggcacatttaagcataaatttaagcatatgccaaattctgtgctggatgttaaagataaaaagccagataaacttggcctttgccttcctagaacttatagtttagtcagggagcaatcaaggcatggtaataggttctacggcctgtgtaagcaatgtgccagaacaacaaagagaaggtgtactaggcagggcacggattatggtgggcagggtgggatgggaggtctgctgtcaggaaagaatgagcaagcattagggagatgaaggggaagttagggagaagttaccaagttgttttctagagctagcttgctaaaattataaactggaaataataatttcctctctttttacattaattacatctatgtgtaagacagaaacagtaataaattcctatttatatcttgaaaatttgaacatatttaagtatcctggagcattgggtttttcttctgttttgttttgtttttccttctctctctccctctctctctccacctacctctccccacctccctctcctccatctccttctcctctccctgcttctttctctcaaacagctaactctaggggttcccaaggagtacagaacagccatcagtcacctgggaggctttttaaactatacaagcttccaattctcccttctctaggtacttccattgttgcaaataactgtgatagcatgcttctgttactgtgtaatggtaacctcacaagtttttctgaaggcagaaaaaaagatggtggtctaattggcaaacattctttagagacttgcctcctagtttattatcttcctcttaccaatttccagctgccttaaatatgtagctgtgctcagatctctttcatactccccaaaaaaagttatcagggttggtgtctgctttgtttgcgtggcttggctagtggtttactaaggtaccatctttccttctttccctgttgctggtgatccactaatgatatccagatagagtaccgttttttgtttgtttgttttttcctttctaggtatccctgctggagtaccgaaaacggaaacaagaagctaaggaaaattctgctggtgggggaggtgactctgcacagagcaaaagcaagtctgcaggagctgggcaaggcagcagtaactccgtttccgacactggtgcccatggtgtgcagggatcctcagcccgaactccatcttcccctcacaaaaaattctccccatctcattcctctatgtcccatttggaggcggtaagcccatcagattccagaggcacttcttcatctcactgcagacctcaagagaatatcagcagtaggtggtaagtttatatttgatgttttatagttaaattgggggtgggggggagtatatatctaagatcattcccagttttacctaaaatctatgggaacacttgatgggaacatctgagacagccagccaacagtaccatctgtcctgttcagctgatttaataatgtcagctgcaaccccccagctttgcagaattaagaattaccaacatgcctgtggagcagtgctttggatgacatgtagttatggatgcagatgagctctttcatttggtgggcactaacactgcctttcctatttctcatttcacatgaaaggtgagtcaagaatccagccaagttccacatgaattaacaacagatgtctctcttccacacagctagcatatacagagcaaaaagacattctgaaaggatttgtctggtttaggggagaccacaaatttaaaaatgaataatactggtggcaaatactgaggatcaaatgtgtgaaatagagaatgaagcacaggagttcagggatcttgaactgaaaaaaataagtctgggaaagaacagtcctggctcaaatgtttcatgttcattaatctatgaaacctttattaaaccagtactgtgtatcaggcacatgatttcctaaaggagaaattttaacattttaaatgggggttaagggaagttaacatctttaacccactttttccttgatttctttttctttaaaagtggttgttgttgatgtttctcttttgtgcctgacatagttggaggcagaggaaatacgttgttttaaattggttctgaagaaagtaatgtttaagaggatgttttaagaaaatacactgtgcactggttagggcttcatttgttttggttaagtcctgtggcttgaacttgcaccctgttgcctttacaggatggttcccacatcagtagaacgactccgagaaggagggagcatccccaaggtcctccgaagcagcgtgagggtggcccaaaagggagagccctctcccacatgggagagtaacatcacagagaaagactcaggtgagcccatggccttctgctgccaccacattcagggacacatgagccgagtcctgtacagttcatgcctagtgctgagttgaggtgagtcagtttctgatgcagttgggctccaccgcatgctaggttccagcccacttatgctcatttgggctaccacatttgtaagatctagcattgcttgctctctgtctgctcttttttccccaaggaatacctttctgtaactctcatctctccaaagtcctggaaatctacctcgatgaaggatgaagagaaagaagacgggaatcacatcaggcatttagaacatagcccataattaaccactcattttgcccttctggcatgctgcactcacccaatttgtcacaaagagagcagtacgggttggtgatggcactggtgatttaaatgaaaaatggctctttcttacttattctaagaagccaagttgatttttttttatatatgttaccttccagaccctgcagatggagaaggcccagagacattaagctcagcactctctaaaggagcaacagtttacagcccttccagatacagctaccaggtgagatgagaaattgctggtctctagccataggagtgtgttctgggtcccaaattgtcctggtcatcctttgccattgagatgctgtctttgcatatagtttcagcagccttggaaataagtcatcatctgcttgtcctcaggtaataaattatgccagaagatgaatacggtgatcaaagacagacattttactgcctttggtttcctaaaaagaatacatggttaaaagatgaagaaaaaagaatgtagggtattataaatgttcaccagccatttaagggacttgttcgcgtccttattcgtttcctcccaactttgtctagctcctgcagtgtgatagtcctcggacagaatcacaaagcctccttcagcagagttcctcccccttcagaggacatcctacacagtctccaggatacagttatcgaactactgcactgagacctggaaaccccccctctcacggttcttcagaatcatccctctcttccacgt

SEQ ID NO: 355 - DNA, 610 bp, Homo sapiens
  source 1..610: mol_type = genomic DNA
atatatgttaccttccagaccctgcagatggagaaggcccagagacattaagctcagcactctctaaaggagcaacagtttacagcccttccagatacagctaccaggtgagatgagaaattgctggtctctagccataggagtgtgttctgggtcccaaattgtcctggtcatcctttgccattgagatgctgtctttgcatatagtttcagcagccttggaaataagtcatcatctgcttgtcctcaggtaataaattatgccagaagatgaatacggtgatcaaagacagacattttactgcctttggtttcctaaaaagaatacatggttaaaagatgaagaaaaaagaatgtagggtattataaatgttcaccagccatttaagggacttgttcgcgtccttattcgtttcctcccaactttgtctagctcctgcagtgtgatagtcctcggacagaatcacaaagcctccttcagcagagttcctcccccttcagaggacatcctacacagtctccaggatacagttatcgaactactgcactgagacctggaaaccccccctctcacggttcttcagaatcatccctctcttccacgtcctat

SEQ ID NO: 356 - DNA, 7724 bp, Homo sapiens
  source 1..7724: mol_type = genomic DNA
gttcataaaacactttttgtttgtcttctctgtgagtgaccagggagatcatacaggtcttgtgctttcagcaagtcatatagagaagagactgtcagaatgatgatacagagactgttggccatttctgaaaccaattaaaaagatggggtaattaagaaacatttctggcatgttctatttaacatccttttccctagaaactgtatgtaaatggcacctcctaaagagagtactcggtactactggaagatacaggctgtgtctgtttctgaatccaagaacttactagtgttcctgtggattctgatggattgttctggaaatagttaaattaataataaattgaaactgtgatgcattcatttaccccctactgtacactcacatctatttcgctgttttcctcctttcctttttttctttcttatttgctattgcttcttccttgatttactttatttcttccttccttttactgttactttgatacttttatttctctaattctgggtgtactattttaaatcgtttctaaaaaatagtttattttccagttttttaaaattagaaatcataaaacatcaacataaatgaaatgcatgcgttctaatgcttggtaactggaatcctatgaatagctcttttcatgtttatgatatgttaatctttaaggtgttaataactctggctagcgttaaatttgacttttaggaaaaaacaccagagacttaaaggatactgatcattttcccttcctttttggaaggtagaaaattaatttaagcgccattttttaagcatgtttccatttgaccgcaaatagaactgactcctttttatcactcttttttatagtaggacaagaaactagatggtgtggaatgaagggaaagaaaggagtaataaatatggacttgtaatttaatgggtgatgatggccccttgtctggctggacagttgtcggacatcgggttaaagaaagaactctgaatttgagaagtgttcagtgaagaagggaagcaccttttaggagagagaaaaagaagggatcccttggaaaatgagataattctaatttgaaggaagaggaaaaattagccagtgacataagtatttaccatttaagtcaaataatttccttctctaccatctcgtttctggctttatggaaaaataaaaaattaaagggcaaaaaattcagtgccggatggacgtagggtggtaaacgagatagtatagatgtaggatgataaacaagacagtatacagaaacataatatagctgtagaattccattctgtgtgttcatcaatgttatttctttctgtactaatttttgtctcaactttttctaggtcttcagaactactagcagataatttggggggacttcatattcagaagtctatataaaggtgactgacccaagtaaatccttttaatttctgttttattttttgcattttaatgactgctggaatcatgttgtagtaaattgtgattataatttacttagcagatatttctggaacttctctacgtgtcagttattgttttggccattgaaactacagcagtggataaaaatccctgttctcatagagtttatattctggtaggaaaaaacaaacaaattataataagaaaatactgcatttagatgatctgttaaatgttcctcggttaacattttaatagctacattttacagagttacttagggaaggaactattcttagggtaatatttgagaaatttgggattattaacagaatttgaattaagaagcctcatcattattaaagcattagttagaatgagatggtcaagctaacctattatggttgctttcatcagaagaatgaaacagtcatgttaaactagacacaaggaaaatggaataatttttatgaaatagaaatttatagttaccgacaatgtttctttttttttttttttttttttttgagacagagtatcattcttgttgtccatgttgaagtgcaatggtacagtcttgactcactgcaacctccggctcccgggttcaagcgattctcttgcctcagcctcccaagtagctgggattacaggcgtccgccatcgtgcccggctaatttttttgtatttttagtagagacagggtttcaccgtgttagccaggctggtcttaaactcctgacctcaggtgatccgcccacctcagcctcccaaagtgttggaattacaagcgtgagccactgcaccgggctgacttaatgtttcttaaggattcatcaactatccaaaatagctgggttggtgtttcattagtgaatgtagcaatcatttattcactcattaagatgttatctgaagtaacttttccatcttttccttttagtatatcttttaaaaattgctctaggaaaaatatcaactatcatcttgggtttataacttgtcttttatctagaaactgtactttttttttttttttttttggagaaagagtttcacttttgctcaggctggagtgcagtggccctgtctcagctcactgcagtctctgcttcccagattcaaacgattctcgtgcctcagcctcccaagtagctgggatcacaggcatatgccaacatgcccagctaatttttgtatttttagtagagatagggtttcaccgtgaaaccatgcattttttaaatgggtgtacagtcgtaatggctacaacaaagggtttttaatgatattaagtacggtttttggtttaagtcttttactgaaaatataaaacaattcagattccctttgctgatcaggggaggtacggtgataatcagactttcatatgattatctggtcagacagctttggggcttttcttttaatctgaattatacagtaagactaatagaaagagtagtgaccaacagcccccagtatttaactgtcttttgggtttacttgatgagtgttcttgttttatcatttacagattttacttcaatttcccaaaggcttagaagatgtactgccaaggtctctgtttggatatactgttagggaaaggaaacatacatgtgtaagactggcctaaaggcaaaaaagttcatcagtccctttttttttttttttttttttttttttttttttttttttggcaacagggactcactttgttgcccaggctgagtgcagtggcatgatctcagctcactgcaacctccacctcccaggctcaagcaatcctcccacctcagcctcttgagttagctgggactacaggtgcatgccaccacaccagatttattttttttttttgagatggagtctcactctgtcgcccaagctggagtgcagtggcgtgatctcggctcactgcaacctccacctcctgggttcaagagattctcctgcctcagcctcctgagtagctgggattaccagcgtgtgccactacagctaatttttgtgtttttagtagagaaggggtttcaccacattggccaggctggtctcgaattcctgacctcaagtgatccacccaccttggcctcccaaaatgctgggattacaggtgtgagccaccgcgcctggcgcacaccaggtaaattttgtatttttagtagagacaggatctcgccatgtttcccaggctggtctcgaactcccaagctcaagcaatccacctgcctcagcctcccaaagtgctgggatgacaggaatgagccacttcatctggcccagtcatttcccagcccagctatatgtcacctccaattgggtgtaggaacaggcgtattgtcatacccagaggtctcacttcatcatctaggctggagtgcagtgcatgattatggctcacctcagcctctacctcctgtgctcaggtgatcctcccacctcagctcccaagtagctgggaccacaggcacacatcaccatggctggctgatatttttttactatttttgtagagttggggtctcactatgttgtctcagctggtctcaaattcctggactcaagtgatccttccaccttggcctcctaaagtgttggtattacagttgtgaaccactgcacccagcccacaattttttttatttgcattaatatcaaagtaagattggagcatctcagaccatctaccatttacaatttacattaaccggccaggcacggtggctcacgcctatagtcctagcactttgagaggctgaggtgtgagtggatcaccggaggtcaggagttcaagaccgcctggccaacatagtgaaacttcatctctactaaaagtacaaaaattagccagacatggtggcaggcgcctgtaatcctaactacttgggaagctgaggcaggagaatctcttgaagccaggaggcggaggttgtagtgagccaagattgcgccattacacttcagtctgggcaacaaaagtgaaactgtctcaaaaaataaaaataaaatttacattaaccccctgggttgactcagtcggtatcatgtacttttcattcctttagtttttttagtattaataattgttctaatgtcttattatgaatcagtgtatcagtcatgactctctttgtagtcttttttgcaaaagtccttgttaacatgggtctttgacattcacattgactttattcccccccaaataaaatgctttttgtttcatcctttcaatgttttttacactactgtaaaactactaatgtaaagtcacacaaagaacacttgtttccctctgcaccatacctccaaatctcttaatctatttttgcatttttttatacttcagtaatttctgagtctttctgttcccagctttcactggtttatggtcaccatgtcaagctatcctcaccgctttttcatacacagttgtttagtctttatcatgaaactgtactcttcgtgatttcgggggtttttttgttgtttttaaaaagtagtcaacttttttagagcagttttaggttcacaggaaaattcatcaggagatacagagatttcccatgcaccctctgcacccacgcatgcatagcctcctcctggtttatatttttgttcatatctagcagcgtattattaccccacaaataaagttgctaagatgattgcatcttctcccaaaattatagttaagatgatttaaaagaaggaagagagtgttcaatgacaaaagaaggcactaagaaacagctgtttccaatcaagtataaacaacaaattgatctcttttaatttggaagaaataacattattgactgcttgtgaaactgcatttatttgtggcctaggaaaaaaacttaaatgaagatcttgaatttttaaagagtttaggtaaactgggatatttttaataaccatcctttatcttaaaacttgtttgctatatcctaggctgccagaaaattttgtttgggcagttttagaatggggagaatgtgttggttagtgagataggcagactcttcctttcccttcaactgaaaagaaaaacaaaagtaaacataactttttgccccctactttgtgaaacattaatgaaatgcatagtaaacatgggacactgtggctgtatttattttataattatcccttaaaagccttattcaagaatgcagaaaaatattcagtaacatttaagataaacttgaagaactatctgataactaggtatttattttactagatattttccttttctgttacaggattcctcatgtccataacatgttggatgaggctctgcagctcacccccactctcagagtggtcagtctccattaattggaccccgtgatttccaatctctgctgtgttggacgtcatgagcattgcaatccctctgggagtcaccacatcagatacatcctactcagatatggctgctggatcagagtaagtgctactttctaggtagtaggtacattatcagtctgtgtggagacagccttcttatggatagctaataggataatatgtagtattttcttaaccagatcctattccactgtaattaacattagacctttccctttacccccattgaaggtggtggaaaaaaggaattagaaggggaaggaagagttttcagaggggtatttctgggcaaataattaatagaaccaaagttgcaaagtaggaattcattttcatttgttttaatgggtggagaaaattggaataaagtaggtgttactacctgcttctgtagagttaatgattctgatggagggagataagaaggtgttctttccaactgattttccttgaagtcctcttcctatgtacttcccattgttctagagtaaaggggccgaaactatatgggcaggttgcctagaccttctgacatctggggtagaaaacatggagaacagcgtcatctgtttttttataatattcgttgcctagaaagaggaccttcaaaatcagtggtaccaaacttttttttcagctaagagcagctttaggaattcagagtttgtccaaaggcccaatccctaaaattatactctcaattcttgaagaatgtaaatgccaaatgacaatgaaggtaggccttcattatacaactttatatatattattcacagttttaaaatttttagtcttttgtatcccttctcttttaagttgtccgagattccccctgctcacagattccccctcttgtccttttacctcccttgtacccaatcttccttgcttacagaaaggaagtggaagccccctacctttcaagacgaagtggcactacaccaggatgtgaaagtccagcgaaagagacccaaggggcctagggggcagcacacccccagaagccaagtctattccaggcagtaccagggattagggtctgggctggaaaaatcctggtgttttgaatatgttcaggtccagttcagactcttgatcccacagccacttcttgagtgaggtgggtgttgctctaattcccctgtttctcttgccattttcacagtccctggggattcttcccccttcagcaaagcaaagcaactgtaccagatttctgggttgaatgacatccctgattaataagtggttttcttccttaaaacagaatattattaaagagcatgtatatttcttcataaagccacctaatataacttacctgtttactgagttccttaaagaggaagacttaaagctaccctgagaaatagtatataatattctggggtagtctaaaatgaaaagcagtgtttgggcttattcccatataaaaaggagaaaggagggttgggggtggggaagggttgattttgtttcttctagagcttttttcttcttttgtttttgtttgttttgttttgtttgcatgcaaaaggtatttagttatgtcagtaactgagacttacttaaccattttacaactctttccccaaataaagtacttaaaactctccctgcattagtaggtagccagtttgtattgtgtttataggtttttataaagtcagctactaacctggtactatgtagattgtctaactgtatagatagatagcattaacatttgtgagaaatttcaacaaagaggttaaaccaatacgtttggaattgctggataaaagacccagagcagttaatcttacaattggtgttttccccaaagtatagacatgactgcccgtaaatactgctggggagtctaggactaattccagaaataaaaatacttctggtctac

SEQ ID NO: 357 - DNA, 16135 bp, Homo sapiens
  source 1..16135: mol_type = genomic DNA
ggctcaccctttatccctgagagacgtcgaaggccccttctgcctgatggcacattcagctcctgtaagaaggtatgtctgtgtttttgtgtgtgtgttgtgtttatgtgtgtgtgctttatttttttaagcctaagattcctatcatcatgacataaataaaatgttctctagatagccactctgcccatgtgagtttataatgagttagttgttcagccataaatactgattcatcaagagtctgtgagactgtggtggaatgaatgtactgcatttttagtgctcagatttgtgactggtcactgatgtctcttctgagaacccttgaggttcctgagtgagagcacacagcagtggatgactgggtagagacggatatgttttgtgtgtgctcttgtgatatgggttaacatgtccatttatgattattgtgtgagattaggccctgggtcctctagaacactgttgcataaatgaaaaaaattaaattgttttgaatcaattcaaccgttattatccactatcatcacttgaaggaaattagaggaaaaatcctattgtaattggcataattcctgttccttgatcaaatgacaagtcggactgtttattccaagagaatacagaatctaccctaaaagactctctttccctctctgtttctgcctctttctcctctttccagttacttactgtttttggatctagtggcagtagcgtttggtggtgtttttggaatgctctttcttaattcccagaagccctgcatattttccaaaggtgtctcttaggaatagatcactccctcagatctatgatgtcgttttccatgtttctagaagtataggacaccctttcatttggtcttcctttgaggtagagtctgttccctggaacacccttttctcttatcctcagatctggattcaggctgccttcctcagtgtctgccattgccctcctccactggcatcacgtacatgaggatgctgcatgtagattatttgatgtgatgaagtctccaactccaggcaggtcttccctgactcctccaaacttaaaagcttttctctttccccaaagaacagaagttatttctccgggggaggggggcatgaaagatgagccaaagtggtgtgggatatggaggggaggagggcaataggaatctgcaaaaaggaaggacactactgctgaatgagcagcacattgcagaaagtcttttcctaattgcacatcttacctaaacattggaatcactcattggtttgttcggggaaacgctcgtagaattcctaaagagaaatttgaccatttctaaggatgttaactgttgaagcatcttatcaagccaggtcgtacaatctcctattttggtcctttaaggagtgtaggcaattatttattacagataagtaatgaagtctgagctgcaaataatatgaactaggctcttgaattgaaattccttcttgataattctaatgctgggttgcagtctttctgtttccatcttttccaactagcagagacttaacgaaaaccaaaaacgtgtctaggactgtaacttcagatctggtagaaaatgcatttctttaagcttttttaacttggttctgcttttatacttgtatctatagcacatccttaaatttctacgggcaacagatagaaattccatttaacacaagtccctgttatattctccaagtgtatctgactatccttaatctcatttatacaggctctactcaagcacttttatctatgtgtcatggttagtctttaggaagagtttaggctgcatacacaggattatcataacaagactatttaaataggatctttaaaaactgtttaagtcattgctttattgtgtgctgttcacatatcaagattctattttttaaaatacagctttttatgaggcaaaataaaatgaaatggaatgttttagctagaatagaatttggctttatagcagtgaagaagagttcttcttctaatattggtcttcttctaatatctcctaatattggttagaaaggacttacctaatgcagaacctaagaacattttcattattcaacaaaattgtaataaaattctgaaaatccctcagagtataagttaatcagatagataagaaaaccctccatgggattatttagaacaatgtatatttctaataggctcactgtttcatatctcactaaagaggtaagggcctggccttgtaagttaaaaacttaccagtataggacaaattaaagttgtatctgtatagttgtactcagattcttatgctatttatttttatttttatcattattattctgcaacttctgaaaagaagaggagttcaggtatttgacagaacattttatgatatccctagagtttctaaattgaatcatagtttttaagaagcattttgcattttttagttcctcagttggtattttaaaaacatttataagtggccaacaaggctctcagtagtgtttcaccttgttctctctaaactcctcttctaaacacaatgtgtatagggcatttggtctccagacttcttagaaaaaccagtctgactgataatgaaacagtgtgctttgcattgataattaatatttcattttatacactggagcattatctgtaaatctccaaacatagcattgaaatttagttgaaccgggactcggtgaaaatctgctcagtgttcagtactgtactataagctttcttcacatacattatctcacttaccatgcatgaaattgggatcattgtcctaaatttatatatccagaagctttgtctcagaaatgtttggtaacttgtccaaagtgaagcagctaataagtgacacagccagatttcttctggtgggggatagtaggggttcacagggtctcactgttgtccaggctggagtgcagtggcatcatcacaggctcactgcagccttgacctcctgggctcaaatggtcctcctacctcaacctctcgtgtagctgggaccacaggcacaccaccacgcctggctaatattcatattttttgtagcgacagggttttgctgtgtttcctaggctgatctcaaactcctgagtgcaaggagtctgcccaccttggcctcacattctgctgggattacagatacgagctactgagcccagcctcacagccaagtgtcaagccagggcttctggactccaaaacctgtattgcttccttgctctttcgccataatagcgagacctttaaaatatttatccatctttgagcctcccagaaaactcctttgcaatatattttaatagaggttcagagaagggagaaatgttcttttgattttaacaacttgctgagtaggtgcatctaaaattaacttattatccatgaggttaattgtatcttgttagatacaaacaaatgtccatgttccttttttatatgagtcctgaaatattgtaaaattatacaacagaacctggaggagtaggtttgattgtatttgctgtgtttcacctcatagctaaccatggtagcatctttcttctagaatactcctgttctgattttatgttccctttttgtagtcatcagatccagaatgtaaattattttacaagtacatctactagaccctggaaatattaaaaaattactcagataggaaagcttagtgaccccaaatgagtgttttctgctttgaaaagaaaaacttaaaggtggccataacaaaagatttttcactcctgagcctaatttttccatttataaaatgagtgctttggacaagatgacttctaagttctcttctaagctttaaggctatatgtatggttctgacaattcatctttacatcattattctgtatctaagatagttcattcttcggattttttattttgtttttgtgtttgcttttcagagacctggttgtatcctaaaatgtttacgtgattcaaattaccattgagagctcttttttatatccttgttcactcttccttccaagtgtttacaggtttacagtttcagttttgctttcatttggccagccacaatgacatttgtatgatgtaagatttttttttttttttttttttttttggtaaaatttttgtggattgtttcctaggtttctaagagggaaaatctatgagaattgctctctggtgaagagagtatttacttacctgtaatacatgttctctaaaggtataaattataataattcacctttgctcttcctattgggggagggtcttactcagaaattgatgtttatcaaaattcgatctgtcttatgtcagggcaggagagccacagagtggtgagcaacctacaactgtatatcttaagagaacacaattacaggtaagaaattttctgtcttccacaggatacataatcttattatcctaatctttgcaggtttactatctggcctaaatttatttcttgtcagtttattattctaatctttactaccaaaaacttgtgactgataggtcttctttttgactttttcccttttttttgatttctactgaagctcatttcgtgatttgcattactcatgcataatttaaccaaactacttgttggaggggggagtcccataggttatttcatttgaaataaaccttttggaaacgcttttggtacctgtagtgaagagctattaatcctcatccaaaatcttccaatgaatcttttttattacctcttcacacgtctctagcacggggcagacaacttttaagagatctttatcttccttctaggcgcttattttatatattagttttattctatacgatcacagtctctcctaaataaatgttaagatttcttcctcagtcttgccattttacaccatcccaaatggtatgaaaagttgaatagcagtcattttttattggtttttgtcttttgatgggatctcattatatgtaatccagatttcctcaagtttttcagttaaaaggaattgataggacaatgttccaatatgctgagacacaagacaataaaatgcttgactgtgtaactgaattagtgtgttgaattgtatcactcaccagttgatgtacatttaaaacaggtgcactaaatagttttagataattattgataattctctggttcttttcaattatagcgctggataaaacaagccttagaagaagggatgactcaaacatcatctgtaccccaagagactagaactcagcacctataccaaagcaatgagaatagtagctcttctagtatctgcaaagacaatgcaggtacgtatctaaaacctttctgattatatgaccaatgattgtttcaggtctgcataaaaaatttaagtatgagtatttctgatacaaaaagaaatggcgtgttttctaaatagttactttacatctgtctttacagaggaagagagagatctcaagtcagggatcagttttcccaggacgacaaagaaggactagacagtgtacagataacagcagaaatggttataaaaaaggttagatacatttaaagtagtaagtttaggaaatttatattcatatttataagatggggcaagggcaagaaagtggtggaacactaatattcaggaaagaattaaaattctgagtgattaagttgggtgggacatggttgagggagcaggggatgaatgaaataagtgaaaaattattatcaattgattgttttcaaaggggcttgtataattagcatacaatttttaaaagaacagccgggcgctgtggctcgcacctgtaatcccagcactttgggaagccaaggtgggtggatcacctgaggtcaggagttcgagaccaacgtggccaacatggtgaaaccctgtctctaccaaaaatgcaaaaattagctgggtgtggtggcaggtgcctgtaatccctccctaaacaggaggctgaggcagtggagaatcacttgaacccgggaggtggaggttacagtgagccaagatcacgccactgcactccagcctgggcgacaagaatgaaactccgtctcaaaaaaaaaaaaaaaaaaaaaaaaaaaacaaattttttaagacagctttaaatctaaagtctttgtgcatttttaaactagatgtcaatgaaaaatcatctgttccattggttttgacagtgacttgcaaaggatgtaattgaaagcacttgtgatatcttaatgtattttgtgacaatctttttaccagtttctcctgcaaatatcagcttaattgaaaagttctttgtgattttcataacttttctctaaatcagttttttaaatattagacaatcaaaataccaaagtaaattagatgctaaagcaacctttcaggttgcaacaaacagaatatttcacattttcataaaaaacccacttcattgttcctgtttaccaacttgctgaataaatgtaatgaacttgaatttaattagataaatttttagtagcagatattgcaactaaaatcagaacttttcttaaagttcttacttcatttggattttacttctttttagattttatttcagaaaacgtgaattgcctttttttctttttttcttttttttttttttttttttttgaaatggagaatcaagcgattctccctgcctcagcctcccgagtaactgggattacaggcgcccgccacctcacccggcaaatttttatattttgagtagagacggggtttcaccatgttggccaggctagtctcgaactcctgacctcaggagatccgcccacctcggcttcccaaagtgctgggattacaggcatgagccaccatgcctggctgtgaattgccattttttaaattatggatttagtttattcttttgtctctagattagattatacctcataagttaccacctatatacctcaggataataaaattccagttatctgaaagataaattatactgtttatttaaaatattttcttctagtattcaccaaaaattagggatatttagtcaaatatgaatagtataaagaaatcttggtaccagatttccatttgtattatttcttttttaacagcttttaaggtgttagtaagaatataacttagctgaaatagactatcatgtttgtgtatctatctggtgtgtgtgttaatgcatgtgtatagttaaggttgggaacaggagattgcatagcagttcacatcctgactagcaaaggattataggaaaagtgtctttgttatcacatgccctggttggaaggaaattaggattcctagtcaccagccttttttgttattgttgagcttctgccctagtctaacagtgagaaacactcacaggacacaccttgcccttaaaaagcaatgtaggaaaatatttgattttaaaaatcaagcagcagtcaaatgcgcaagttatattgctacaaaattagcataaattctgaggaattacttttatttgttggctctcttttgtttttttcaagaataccaaagagacattaagaaaggggaaaggatttctataatagaaaaaatcaaacagacctttacttgaaaaccagctgtcccctttactaactatatgatgttactagaagtctctgaggctaggcgttggtggctcacacctgtaatcccagcactttgggaggccaaggtgggcggatcatctgaggtcaggagttcaagaccagcctggccaacatggtgaaaccctgtctctactaaaaatacaaaaattagctgggcctggtcacgtacctgtaatcccagctatttgggaggctgaggcaggagaattgcttgaacctggaggtggaggttgcagtgagacgagattgcgccactccactccagcctgggtgacggagggagattctgtctttaaaacttaaaaaaaaaaaaaaaaacaagtctctgagcctcatttgtaaaatgggaatagcaatacctgctttatagagctaacattagaatgaataatgtatataaagttctcaatatagtatcaggcccataagagtaattattatacggtcattattctacacagaatactctttcttgtagagtatttgtggattaataaatacattaaagattctggctgggtgtgatggctcacgcctgtaatcccagcactttgggaggctgaggcgggcagatcacgaggtgaaaagattgagaccatcctggccaacatggtgaaatcccatctctactaaaaatacaaaaaaaattagctgggcatggtggcatgcacctgtagtcccagctactcaggaggctgaggcaggaggattgcttgaacctgggaggcagaagttgcagtgagccaaggtcacgccactgcactccagcctggcaatagagtgagactccgtctcaaaaagaaagaaagaaagaaagagagggagggaagaaagaaaagagaaaagaaaagaagaaagaaatacactaaatattttaagttcctaaaagctgaaactttatagaaataaaagttattatcaaagtagggcaggggcatgatgttcattatttgtaaatgatgtgggtctattcttagaagagcctaagtaatcagctgaaaaacttagaattaataataagagtttaggccaggcgtggtggctcacgcctgtaatcccagcactttgggaggccgagatgggtggatcacaaggtcaggagatcgagaccatccttgctaacacagtgaaaccccatctctactaaaaatacaaaaaattagctgtgcgtggtggtgggcacttgtagtcccgctactcggggggctgaggcaggaaaatagcatgaacccaggaggcggaggttgcagtgagctgagatcgcgccactgcactcctgcctgggcaatagagtgagactctgtctcaaaaaatatatatatatactaataataataataagagtttattaatatcactggatagaaggataaatatataaaaagtgtaaatatattttaaaaaatcatttatataccaagaaagtaaatgaataccaattttttttgttcccaaacttaacaaaactaagaaactgcctaggaataaccttagttgggtatatggagtaaactgttactgagaaatatttttaaagtctgaggaaatggaaatttctttttctttttttttttttcatgaatcatacgtgagcctttgataaatttcatgttcattatggaaagaatatatatatgtgtatatatatatttctttctctttctctctgtctttatatagttcccatgaaactgccttgtttttggaatttgattaaatgattctgaagtctacctttaaaaaaataagaaaaaaattgaaaaaataataatgaagtactttctcttgaggtgtaagacgagcttctagtatgaagctaatagttaaatttagtataatattgatgcaagaatggatgtatatatggaacaaaatagtcagaataggcctaaatataaatgtaaaagttggtaaattgtcatggaatttttagttaggagattgaaaaagaattagaatctagctggacacggtggcacgtgcctgtaactctcaactacttgggaggctgaggtaggaggatcactcaagcccaggagtcaagttcaacctgcgcaacacagcaagaccttgtcttcaaaagaactactaggtcctttgccaaagaaaattctaggcacattcaaatatatatatttttttaattcaaacttgggcctggcatggtgactctcacctgcaatttccagctctttgggatgccaaggcagaaggatcacttgaggccaggaatttgagaccagcctgggcagcagagagagacccacatctctacaaaaaataaaaattagccaggcatgatggtgggttgcctgtagccttaaggaggctgaagtaggaggatgacttgagcccaagaatttgaggctgcagtgagctgtgataatgccactgcgttccagcctgaatgacagcaagacatctgtctctaaaaataataaaataaataattcaaactgtattaaccatgtttttgtgtctatactgcctctgtattaatagaggattagtacattggggaaaggatttgcagtaaaactgccggggagtaatatccctgctagcaatctgataaaatttatcatgtgcattaaaaatattcataatccttaacctagtagtcgttcatttgttctgcttggtatctttcctacagaaatagacaaagaaaccaaaatttatatataaggttggtgcaaaagtaattgcgtttttggaccattaattttaaatcactgtaactagactcagacacatctttattaatcaaaataggaaccactgcaatcaacacatttttgccactgagaaataagtttgtttattcctgtagcctaaaaatctatgcttcaggattcgacaaactcttggaaaatattttctgcatcctgctggttgtggaagcaccttccctgtaaaaagttgtcagatgcttgaagtggtacctggttggcgagaggtcaggtgaacatggcgggtgagacgaaactctgtagtcaaatttgttcagcagcttcagaagttgaatgaattgtttattagaataattaattcttagttattaacaattgcaaaaactataggttaaaaataatctgaattccaaccccaggaatggtagaatttgtaattttatctgcttgtgcacatacttgtaatggagtatcatatactatttattgaaaatcttatttttgattcattttatcaaattaactccctctacccccaaaaacagcgtagtaccacttttgaattagatttgtgatcttacctagcaccttgaatttgtaagaatattaaaagaatagccaggtgtggtggctcacgcctgtaatcccagcactttgggaggccgaggcaggcggatcacgaggtcaggagatccagaccatcctggctaacacggcgaaaccccgtctctactaaaaatacaacaacaacaacaaaaaaaaaaaccgggcatagtggcaggcgcctgtaatcccagctactcgccactgcactccagcctgggcgacagcgagactccatcaaaaaaaaaaaaaaaaaagaatattaaaagaagaatatacgatgactaaggttccttctaggaatgtaaggatgagttaatatttgaaaatttaataatcgtcatttgttagcaggtcaaatgggggaggagaagtcataacacagtgacttttatcaatttaatgataaaataacatactatgatcttttaatatctagctgaaaaattgccagttgtcatgcatcatgaaaactagttaaacatcaaaataggctatcaaattatcccactattaccattattatttaatatagtctaagtaattgttagccaaagtaattacaccaaccccctcccccccacaaaaaaaatcaacataagagatataagtactggtaaagagggttaatgtgttatcatgtacaaatactattatctacctagagagttaattgaaaaactggtagagattaatagggtaactggataaaaaataagtatgtaaactttttaaatgttaataacatttagataacaaagggagagatacgttttattcatagtagtaaaaaaaaaaaactaaagaactctggagagtaaacttaattagacatgtggtatatatagatgaagagggacataatatgtgaataacaaagattatgccatgttcctgggtaagaatgcttctcaaattactcctgaatttcatctaacaccaatcaaaatcctaacttttttttttttttttaatagtatgagcatggtcattgaatgacttctatagttcattgctagaatagctaaaatattttggagaactagaacagaataactggaatttccctaacaattttaataaaaagtatgctggtgttgattcagtattggacaataagtggaaagaataacattcggaaataaacattcagaagataagcccagtatatgtaagaatctaataagataaatatatttcaaattaatagggaaattatagttattctacatttacagaagattttggaagaaggtgctggctatttgttatggggaaaggatggattaattgctaccccatatttaagtatgttcttttttccttttttgtaatggcagtttgtcagtgtgaaataaaatgttcttttttaattaaaatctaaattaaaaattaaacatggagacaaaaggaaaataggctggcatttttacagtgtcagggtgggttagcaaagacatgatatcagaagcagaaaataaagtgatccgtttgactaaatagaaacaaaacatatagcagagacttgtaaataaaattgaaggcaatcagtaaactgggaaaatacatttgtaattttattgacaaggggtcaacattcttactatttaaagagcccttacagatgaagaaaaagaccccaacacctcagtagaatgcaggctgaagaacatgagccagcagttctcacaggactaaatataaactacacatatatagatattcttttgatttaataatcctacatgtagccatttgttctaatagcaaaaaatgaaaaaaaagttggttaaattttgataatactaatgttgtgcagtcattaaacctgaactgtagatttctattcattgtcataaaatgttgaccatgtatttctgagtgaaaatagttactgagtagtttaggtaaggcaagagtcagtgaagcaatgtctcgataaaaatttaccaggatattagcatgcgtttatttgtggatatgattttcaggttgtgtatgtgctgtataaccttggtaattttttgagtaaaggtgaaaaataataataataaaagatggatagatttgaccacataaaatttggaaactatatatgcaggaaaaagagaaaaagtaggcaaatgacttggctttctttggcctgtaaacttcttaagggcagacatcaggtctcttgttgaatacagtatcataataagtactcagtaaatatatgttgaatgaatgccttgtacattgatttgcacgtggcagatttcacctgtatcttataactcctttctacaactaacttcatcacttaacataattgactttgatagttatagtgttggacctagcagtacagagatctgtaagattccattgtttaagacccttgaaatattaaatatataaaagttattccgaatataagccatgaattacatgtttgtttctgttttatacctaggcactttttaaaaggaggaaagaaaatttagtatctggaacaaaaggaagatgtgaatatacttccaatctaggaatattaaaaatcctgagatatcagaaaggaaaaatatgcatcttcaataattttttgcatttattcttccctcttcatctaaacatctcctaccctagtttagtgcctcataattctttgctaactactgtgttaactccagatggtttcccagttactagtctcatactgaccattgcttccagataatcttcctggcccaaaaattttccttgaaggcctggaataaatgtcactccttccatccaccaagccttggggatatactttaacctattgattaagaatatagatagatggagccaggcgcggtggctcacgcctgtaatcccagcactttgggaggccgaggcgggtggatcacgaggtcaagagatcaagaccatcctggccaacatggtgaaaccccgtctctactaaaaatacaaaaaattagccgggtgtggtagcgagcacctgtagtcccagctactcgggaggctgaggcaggagaatggtgtgaacctgggaggcggaccttgcagtgagccgagatcgtgccgctgcactccagcctaggtgacagagcaagagtccgtctcaaaaaaaaaaaaaaagaaaaaaagaatatagatagatggggccaggcgtggtggctcatggctgtaatcccaacactttgggaggctcaggtgggtggatcacttgaggtcaggaattcaaggccaacatggtgaaaccctgtctctactaaaaatacaaaaattaagaatgtagatatatgggagcaagaatacctgttttgtctctctccacacatcaagtttctcacctttaatatggggatgataataatagtgcttgatttatagagttgttaaaattagatatttcacaataaagcacatggcatagtctgtggtatataatcatcatttagaaaatacagcttttttttttttttaactaacacatagcaatatgatcacctttcttgatcatgctaatactaatgtgttcactttttttgttgtgtcgttttgttttgttttgagacagtctcctccctctgtcacccaggctagagtacagtggtgcagtctcaactcgctgcaacctctgcctcctgggttcaagtgattcttgtgcctccacctcctgagtaactggaactgcaggcatgcaccaccactcctgcttaatcttttttgtgtatttagtagagacagggttttgccatattggccaggctggtctcaaactcctggcttaagtgatctgcctgcctcagcctcccaaagtgctgggattataggcatgagccaccacacctggccctgtttctatttcttacaaattttaagcctcttgaaaatagaatgtatgatgaccatttttcccttcatacctagttcagtaatcagtaggtattaaatatatatacttttaactgtaaatgaataaaactgtatttttattctgagaatcaagtgagaaaggtgctttgacctaaatggtcactaaaatatttagtgtagtgacttgctttttaagtggatctaagaagtacagaaaataggattattctagtcaaaaagaatgtgaacctaattttttaatggttgggagaagtttttgtagaaatcatttcatgctttttaggtagaaaaggggctagacatggatcaaggaatcatataagaatagaaagagcttctgaaaagggacacacatatataagagatggtgaaaggaatttggatttagcatcccagtacctttagttggtgatatagcagtttagtagagggtaactgtaacacagtaacaaagacttttcagaaactcaatgtaaaagaaagaactgtagcagtggctcacgcctgtaatcccaacacttggggcgtctaaggcgggcagatcacctgaagtcaggagttgaagaccagcctggcaaacgtggtgaaatgccatctctactaaaaatacaaaaattagccaggtgtagtggtgcatgcctgtaatcccagctactcgggaggctgaggcaggtgaatcacttgaacccgggagacggaggttgcagtgagctaagtaaatgccattgcactccagccttagcgacagagcaaggctctgtctcataaataaataaatgaataaatgaaagaattttatattttgcactggtagaaattaaattagagatcagtcacatttgatttacctggagtttgggagatagaatgttttcagagttattttaagcatggtaattaaagagtttctttgggattttggttggattggaggagataacttaatgggatgaggcagaaaacagttaagagccattgtagattacagattaatggctttactgtagagccttaaattaatctgtggtttcaaactctcatccaagctttgtgtttcacagacttgttgagcccattaaagaaatggaagtctcgctatctgatggagcagaatgtcaccaagttacttcggcctctgtctccagtcacaccaccccctcccaattcaggctcaaagagtccccagctggccacacctggctcatctcacccaggagaagaggagtgtcgaaatggatacagcctcatgttttcaccagtcacatctcttactactgctagtcgctgcaacactcctctacagtttgaggtgatttgggtttggttgctg

SEQ ID NO: 358 - DNA, 32765 bp, Homo sapiens
  source 1..32765: mol_type = genomic DNA
attcccggccaggaaacgccgtggcgccgcgttgggcctaactcgagtcctgccgcctcccgggagtgccgtgcgccgcagcccgggcccaggccccggcagcgcctgggacaaggtaagggtccgacagaaaagagaccgaacctcacgatcgggccccaggggagggaagggtcacctcctccgtctccccgcgctcgctctccttgggtcgtgggcctggccctccccaagctcttaggaggatgctgccacttctcacccccctcgccgccttgcacacaccgttgcaacaccccattttcccagggagagagatccccctctaatctaggcgacccaactccccctttcatgtttttcctgggtcaggacgcttcccctcccccaacgcctcttcaccccctttcctgggaactgcctactccacgtttacctttcccttgaggagaggcctcttgctgccctccgctcgaaatacacaggcatactttttttctctccccgatcccccactccctacccccgttctcgcggccttgtgacagacaactctgatcgctctgggggccgcgatctcccctccgtaatcttcctggacgccttccctctcgttttctggcttcccacctcagatggctgcttcccaaaggcattaccttcgccacccccaccacacgttctctggctccccgtggcgtgtgccacagcgtgtctgagatagcctcgttgaatgtgtagggttcgagcctggagttgagccagattgtgtcgttttacttgccttgggcgtggagaacgatcttgtgagaatatcttcaaaggcagaaaaatattccctttatgaattctctttccctctgcgtgtaagtcgggaatgtgaagaggagtgtaggaaagagccctggttcaagtaggtaaatcgcatgagagggaaagttaaactgttgggaaagccccttctatgctaattgattctatagagtccttgcttgtctcacttcttgggcgtcagtggtctttctcttggatatggatgctgcagtcagctctgctggtctgggtcaggggtgcgtgtatgacctgcattttctgctttctcatgttacttgtgcaatgtattcaccggtaactcatttctttcccagacctctgggttccactgggctttgtctatatttaagttcatttctccagtttccttcctgcacataggtactgaacgaatccccaagttctgtgctaattaccttcatcagttgactaaacaagtttttagatgacatatttgtgaccaaggtcatatttacatttctttgttggacagatgttacatagctatacttgtgattggggaggatccagctgagtggagtgtgctgagctttttaggagagtgtgtactccctatttgaaattattttttggttgttaattttatattattaatgtttttaggtcacagaaagttctaagtggtaattttagatgtgtgggatctgagctaggactaaagcagagaatacccacgtaatcagaggtttctgggctccatagaggacgtagggcttttttttttctattggatttcttccagttttctcaggatcattagttctcttctgtagccaaaaattctggcctgttatgggattagagtctttaaggtttactcagactgtcattatgtgtagaaaaatgaattatgccctttggtaggacatgacacaaggctctgtttctagctgcaaatttaaattagattgtagagtgcttgggaaattggctttcaaaagaccaaagcttaatcttcactcctaaactgctggcttaattaaaatggatatttagaatttggtaaatgttgatttttctaataaaaggccttggtttaaaagggtgaccttaggattgtttctttcttaaaagcataattccagcccttctggcatggagcactggtccaaaaaaaaaaaaaaaaagtgtgtgtaaggagtgggggtggggtaaagagaaggttgttcctttgggttggatcacaggggtgagtatacaaggcagcagcagctgctggctctggagctctggttgctacgtgagaagcttgagtagtgctggctgctgtctccagggaaggacagcagtgcagcgtccattaatgctgctggctgcagggagcagcacttaggcgatggctgcttcaggactaagaagaaaccttgcttttctgggaattttcactgctgagctggtttgctttttattggtggggagatgggaattagtaattcataatctcctacccatttatggatattggcatctggaaactggatcatggttaaagcctttctttttttgtttgtttgatttgatttttgttttttggcagatttttgttttttatctagacatttgtgcttggataggactaaaagttccattagagttttaatttttcaatcagtttaaaaacccaagtaataattttaagaatctttctgataaccacaataggaagaaaataacaggaattttttcctgcagctcacatatcatgccttcctccatctctttaatcatagaatcaattcttattattttgttatgtgtctccatcctttcgattagaccacatttaccttatagacgatttgctaaacattttactaagcttgaactcttaaactctaaaaaggtgccattttggagtggtttctaaataaatatttttaatttgtatattagtaataaacttctccagattagatattttctttggagtttgacttataagattgattcattatatacatgttggatatagccttctgacatcacaaatatatgtctttggccataatccatctgaaatgtaggacagaccagaagaaatatgcagaaatcgaataagtctagttcaggatactgagaagatggcctctgagccccttaggtgatctcccctcccccacaactcctgaacattaggatgatctctgattaagcaaaacagtctgagcgtggaaaaacttgaaggagaaccaccaccaccaattatatgcaatactggacatattcctgtgtgctgtttttcttccccaagactcgtgtatcctatacttttttctctcagaattttgatttgttcattttcgtgtaaatgtacttaaatctcacaaacatctataatttgtagtatcactctggcatttgtggcagagaaccaaaaagaatggaaatgagttttgtcattcacaaatgtggctcacattgttttcccagtaataaaagcagaccaatgaaacagaacctttaatggatactattttaggaggttccaattcttattactatcacatagataagatgcaatagcagataaatatgatttcatgtatactggctgtttgacatacttagggtttaagataaaaatgtttgtagttttttactctgtggcttaagttgctatataaaataattgcttttacactcgaatttcctgttgtttggaaccttttgtgctcttgatattatcattttttagaggatcatacaggcccttttcatagaaggatttacttaagttatacccttgaaaacttttttatatcttttgatactgttttgtgtccaggaactgactttctgaaattattctggcttttctggggagaatgactatttcatttttacctttgaatggggaaataataaagtgcaaagtacagatttgcagataattacttttgctttatcctctccatgttgaaataacttatgaaaaattaggccatagttaacagcagtcaatgactattggatacattttatcagaggggaactggatcatgaataaaataaaattttaaaaataatttttggctgaactctggtgattcatcagtttaatttgaagtcagaaggtctagcagtgaattttatttataaaaattgtatttcaagtgttgaaaactgaaacttcttgaccagtatattttgtttgaggcatcaaactttgcaaaatgtgcatcgtatatttagtgatataactggtagtcatttgtaatttaaagtattctttcaaaggcactctttagaaagtaatgtagtgtacccgtgatgggcagggattggtaccattccttactgccaaaaattccaaaatatgtggcaaaatgattgatttatcttgtgggtgggattctgggaagttcatgaaaggtggagagaatatagtttccttcacttgtctatatacattttgttaaataagtcttaggaaaactgttttattgtatctttaattatgaattgcgtaaaagatacccagtaactttggggggaggtgctgttagaaagcattacattggagagaattcccctaccctgggacaaaatgcattctgtctttaatacttagcgaagggaactatgggataaaataaacaatgaaggtaagctcagtctgctttatatgtgccctcactgagcaaggaatttgtaatcgcatcgtgcctcattcgtttataccatcatattgattttgtttgctgagtacctgagggaataccttacttaatgtaaggtcacattaagtatgtttgatatgaagacagggaaaggaattttctgcttcttggagtaatgtcttagtatttttaaaacacttaagtttttacatcaggccagttttgcctgatgctcatgtctgttgctttggttgggctgctgctttctcttctgtgttcttatgggttcgttgtggtataaggattcccacagctttcatggcagtatgaagtaatgagaagcattgccttagccatgttagttacatgtatacttttggcctatgttatgaatcacaaaaagcggtagctataggaatgtatacaaaatagatttctgtctggggaatcaagtttttgatttgtgctacctaatggaggggaaaatgctgaatttcttgctgctctgtttgagaaatagatggaagcatgggaggagccagagacctctgcagcaggatttggtctaagtagaaaaggaagatttttgtttcaaattgccagctgcttatgtcagactgactcccttattatgcctccagtaggcctgtcaatatggccaaacagctagataagtgcggggcaggacaaagggctctttgcacagcagggaggcaatgttggtgggggaggggcaggaggtaggaaaggcaagaggaggaggttcttttccctgggagattattcagtttggcatacaattaaagaaatcatttttagttcccactcaagcattgaatttttgccaaccacatactattaaccccaaatttgatacatttcagaatatcttgtagggatccattctcgccaaggaaaaataaaaaaataaataaagctctgtataggttaaaataaaataaatcccacactctgcaccctcctaggtgcaagtcacctcccgaggagacccgttctagagctgaattctcattaagaaatggaaaagaatactctatctgaataaaaacacattgtaatacaatgtgtttatttgggttgggattggacctgaacatgtagaataatttgtttccctttatgaaatagttgctcgtagttgtctacaattttatttcattaagataggtagcacattacagctttcatgtgttgggttgccatatgtaaaatgctaactgaagaaaggctactttttaatttcagcctcatccttagttcctggagaacctgatatttcctggagattactccctcccccaccttttagtttaggcaacctcttttgatacatttgtgttcagctcgcatacaagtgggatagttgcatccagtttattaagacttagtatgaatcatagagttggaaaagatctgttggttatctggtcctttaaaccaaaatcataatgaaatattttgaaatttgggtccctattgaagttttcattaaaatgttaaaggatcggtgttctgaacaacatttttagttacttttaaaataaatgttttgcgtcagttctttttttaaaaataaagaatttcatttataggcaaattagctggcaattatttgaattgtgataggatttctcttttatgaaggaatatatgacaaggtttttcaaaatgcttaatatattttaaaagactttaatttttagaaataattggtttgaacagttttccaagagcacatttgttgcttgggttgaggtaccacctatattgcaatgttactaaactagccttaaagttttcccttctgtctatactgcatgcaacaataaagggaactggaatgttaatttccatttatggattagcagaggagatgttttaaccgattaataaccaaaaaactgcctttcgtacacgtaatattaagcaagcctgaccaagttttgtgttatttctctctgttaaagaaaactggatgtgttactacttaacattatattgttatttaatggtcttggcagtaatgatataatatttcgaccaaaagaaattttgagtaattaattattattgtaattagttggaagtttctcatcagtaaaatagcaacagcattaacacaaaatctagtgagctatattttatattactacagaaatttagggtagtcatttctttctttataatttattcacatggattatttccataaatttgtgggactaaaatagaagccatctagtcaagcaccagtctccataccagacagttttctctgcatgtgctatgacccacattgccagtattaaacatcctttacaccctcccccttcccagataattagaaatctcttcagggtagcttccattgctcctattacctggatcttgctagaggctctaagaagttcctggtaaaagtgagacagtaagggaccacattttgattccaaaggttttgataactgttagggctccccaaacagctaatctcattttcaccaagacttagccagcagagggctggaatggaggtgaaacacaagcactgtacctcatcttgcctgtgcagctgctccaccttatttcctgctattattatctcacaacgcctcctcccatcaaaaagaaactaggacaaagggggaaaattggatgggctaatgtgatttttattatgctaggttgtgggcttgtttatatgtacttaaatacaaagctaatttgccccattcttaaaagtctttagtgatagagattttgtaacttctgtatcttctactttctttcttgataaaccatttcagattctcagccttacagaaagaaaggttttaagcatacttaattttcgttggccgttcacagtcattattaccaccagatgccactgtattattagcttgaagaaaggtgggctctcttctgtacataatatctgcaatttgttttggaaaatactaatttgtataaatctgatttatgactaaaataaggttaaaaattagacctctatgtatgtttaccctattaccttagtgggggtgaaattaattagctctttgaacataaatttttcatgtcttagagttcttttttcaagctgcataatttatgttcttcaagccatttttatcccataccacccccacaaagggggaaattttattttttatcatttttattgtctttcaatggtgagattttcgccaccccactcctgaaatgtgaagactcaaataaaactgagtaatctaataaggtatatgcgttgctgaatgtagtaagatgattgtttcatcattcttagatattatgatctagtttgaatctggtttccagtatcatgttagcatatttaatactgttgatatgttaattttaatacatgcccaggtggatctccttgctttctatttgtgccccttgtttgtcgttttgtatgaagggggtttttgttgttggattttcttccccatctctgtgtcctgttatgttctttggcttatgtttcaaaaattctgtttcctaccaccaacctctgtacatgccacaacacatacaatttgtactttcacagtttctgtgaagtaggatgatctgcagttaataatcaactgtttgggcattcttggtatccaaggaaggttttacttagaaggaagaacctggaaggacctgttggcaattagactacttctgcgtttattttacattttcccttattaacgtaggctgttgagagttgacttgttttataagagaaaccagattgacagagaagacccccaatcagatagagttattttaaaaataaatgtgtttattatggtaacatttggggtagaatctaaagggcatatttttaaaaaaacttttagttctaaagacaaaagagtttaacctaaaacagaacaaagagaagggcctttgaagcagtatgattgattatatgctgaatgtagcattagaatgttgtatgaaagcataaatttttattttctcaatttctatggtacaaactactatgcccatggaagtatgtgtttatgcccacagcctgaaatatattcggtggaatgccttaaaaaagaataaatctggccgggcgcggtggctcacgcctgtaatcccagctacttgggaggctgaggcaggagaatggcgtgaacccgggaggcggagcctgcagtgagccgagatcccgccactgcactccagcctgggcgacagagcgagactctgtctcaaaaaaaaaaaaaagaatagatctgaggaaaatgtaagagcaagtctaaaattttgaagtcctttttgaaatgctattttttcctagacaaatttagtgttatttgtggcaaatagaactttaatgtcgtaatttagtaatagaacaaaataagggtgggtttacatgtccctgcacattttaggatggagctaaaaattataatgtctgcataccaaattgttacacattttaatattggggcttttattgaaaaagtttacccaatatttagaaacctttaaaaacaaagtgacataaaatattcacagataaatcaggtagtcaccttattggtggcatattatgtaagtgtactaaagccagatatttagtgttaatccaaaaatatgaaaattatgctaacatcatatacagatctcagaagttgctgtagccagccaggcgtggcggctcacacttgtaatcccagcactttgtgaggccaaggcgggtggatcaccttaggtcaggtgtttgagaccagcctgaccaacatggtgaaatgccatttctactaaaaatacaaaaattacccgggcatggtggtgcgagcttgtaatcccagctacttgggaggctgaggcataagaattgcttgaccctgggaggcagaggttgcagtgagccaagatcgtgccactgcattccagcctgggagacagagcaagactgtgtctcaaataaataaaaaataaagaagttactgtagatgccactcttacttaaaccctaggccatgtgtggagtcccaggggaagacatgtatttttagagaaggaaggctctaggtaggtgtaaccttcctcttacagtttatcatgaacagttagtatgaaaaggaatggctggaagtttgcagtagtacaccgagcaacaagagaaataaacatatcccacttcatgaaatgactatgccagccaagggagatgaaaaacaattttttttatagtacacctcatttttttaaaaacactttaatactaggaatatgtttctgtggcaaatagttacccccaaaggattatgtcaaatatctcttgtgaaaattaattttaaaattaatcttttggctgggtgcggtggctcatgcctgtaaacccaacactttgggatgccaaggtgggcagatcacctgaggtctggagttcgagagcagcctgaccaacatggagaaaccccatctctactgaaaatagaaaattagctgggcgtggtggcgcatgcctataatcccagctactcgggaggctgaggcaggagaatcgctcgaacccaggtggcagaaattgcagtgagctgagattgcgccattgtattccagcctgggcaacaagagcaaaactatgtctcaaaaaaaaaaaattaatcttgtgtagatagtgaccacgttttactttccttgggacagtcctggtttatacctgctatcctagcgtaattagtaatagcacccgtttcactctcaaaaatgtctcaatttggatcataaattatacgcttaccataattgtagaggattgtgagacttttagtcgctacctagcaacctagtttttcttgatagagctcttcttattctggagtctcctgtgctgcgatttatctgttgacctctctgaacccccatttccaaatgagcagtttttcgaatgtcttttttcttttcccattaggtggtagtaagggaaggagtaggtatagatttgattaattttttaattttttattattaaaaactccaattactacaaaatagaaaaatactttggagtttattaaactgttagtttaaaaggttccatttgatcaggataaggtccataccttgattggtaagtttgagtctttatagattctgttttttccatgtaggattcttgttaaagaaattcattattttgtggagttcgtactctggattttgaaggttggataatcatttaacacattcctctattaaacaacctccccccacctgtatttcatgtaaattactgcttagatagattgtaagcatattttataatagtactgtgtatttccattaagagttacataatttctgcttgtctgtgtaatgttaagcagctgttgttattcattgcctagatcaaactttgtggtcttaaaaattgaagacctggaagagcttttgtttgtgtgaattatgtcaagatttaccatattagaaactaaaactgagaaaaattttaagttatttattaatattaaaataacagtaataaagcctgctaatacaagtaatgtgattttttaataaaaataacatttttaattttataagtgtcgtttgacatttttgcaaatctctttaatgtctgacttaatagaagacagctgctttctcataactccttctgcatttaatttcttgtgataagttgttttggttgaagactgaagaaaatctggccttgtacagataattggttggaaaatggaagacctcatataaccctctgacagaatctagaggacttcaggcattctcacaccaccctttttgagaatcactggcctatattcatgatttacttcatattagatgatattttcttacttcttcatttattgtccggaatactcacccttatttttatttggctatactaagatagtttatatacagaaggtaagataagcacttgggttttttacccccttatttactagttttcaaaataatgggttggtaacttagcaacatctaaagacgtgaatgaagtattattattgtgtactcatggttttaaacatgtttgatatgttacagtctctggcagttactatttttgacattcaggttgtcctacctttgtctgttggctactaaattcttttgattcattcttaatactttcctcacttgtttccttgcttcctactattactagatgttctaggataattttgtacattttttgccccaaacctggaatcagccatttctgcagaaacctcttcattcttttaatgaaaaatggtacttagaaaccacagtatggatggtaggagtgttcattgctcttggtttgggccttgtttctagatttttcaatgaacaaagtttaaaagtattttatttctttttaaaaatatcacttggtattttaaaagctgcatttcaaactcagtgctacatgatgtttacgtaaacctaatctttctccctttccccatgcccaaaatctcagttttcactaacaccaatgtaatttctctttgttttgtgccacaatacacacactacagttttagtgtgacagaacaatatgattactggaaagtggctttttgttttgttttctcatgtctttttgcccttagggtatatccctttagagatagagatagtcatgcctcacttgatgaggatattttctgagaaatgtgttgtcaggtgatttcgtcattgtgtgaacatctagaatgtactaacataaacctagatggtacacctaagctatatggtatagcccattgctcttaggctacaaatctgtgcagcatgtgaccactggatactatacgcagttgtaacacagtggtaagcatttgtgtatctgaaaatggaaaagataaagtaaacatacggtataaaagataaaaaatggtacacctttgtagggcagctccattacagtcttatgggatcattatcatatgtggtccatccttgactgaaatgtcgttatgtggcacatgaccatatatagtcagattacagtattttgaaatcccccttagaatagttctctatggttgtgccaccagtttgatacacagtgaggttaatttgttacattttactttcagatttttcagggattaggttttgttttatgattatgtaaaatacttaaatggttaataagtgaaatttacgaagctgggtataatcagaaaaattgagcttctatcctagtgtcttccagctggttctctccctgtccctgtatgttagactcaacagagtcatcatgaattttcagagtgatgttttgtcgatacttccccttttagcagaagaagcatttaggttagttcatttactaaaactatttccttctagatttttcactaactaatatttttacactgtagaagaggaatgtggaaatttctgttctttcttttttggaaccagaatttcttggcttaatacaagcagtttgagataagaaactttctccagtaaaaattctctttttttttttcttttttttcttttttttgagatggagtctcgctctgtttcgcaggctggagtgcagtggcatgatctcagctcactgcaacctaggcgtcccaggttgaagcaattctcctgtctcagcctcccaagtagctgggactacaggtgcctgccaccacgcccagctaatttttatatttttagtagagacagggtttcaccttgttgttcaggctggtcttgaactcctaacttcaggtgagccaccgcacctggccaaaattctctctcttgaaatgccagaccatgtttgtctctgggaatttcaggtacacttgggacactggtgctacttgaagtgtagagagctcatcagttaacatttcttgaatggtttgcccttagacctgaaatgtatgttatttagaaaggatgtcatatattttttaactttgtcatttaaaatccaagttatttgattttatgtgttttaaataaaatattaaaactttaaaagtcttgtacctgttaaatgttttatccttcctaattacagtatcttaaagttatcacatttcagcaatacgtcactttctaatgactaatatagtctttaaaaatactaaatcaagatataccaaaggtgaagaaatagtgattaagaatgtgaggattctagctgtggttttcttgctttggctttggccaagatgagtttaattctttggtctaataggaataatacttttctcctaaacattatgagcattatttgagttaatgcatgaaaagtggttaaaggaacagtggctggtgcaacataagcatccagtaaatgctgcctttattttggaagtggttattgttacgagtatttgatcagttctctaaactctgtctgaactttacttagaattagtaatgttcatatgctgtaaataacacctgattttcaatacttcattggttatatgaaaagaaccaactgttaacaaaggaataattggtatctagttaaaatttgaggcctctgacttcacaagtataccagtgcttactatataaatataatcacatttaaaaatttaataaagaaagttttaaggaagtaagtctccttttcaggatccagggtcctttacaaacactggatcctgaaattgtattatttgttgtggctttagggtattgtgtatgctgaccagagtcacaggtggtttttttgtttgtttaacactagaattttgagatacatttgtctttacatgccctcaaagtaagttatataacaccagattgttcattagttcaggtttgatttttttgttgttgttttttgtttttctttttaatactctggggttggagtgaggttgtagagtgctataaggaattcctattagaagatagtattttagatatgggcattctaggaaaggacaaaatggtacactaaagttatcttcccttttcccccaccaccaaaaaaataaggagcaaactacagtgcacagttttgggttttttttttttttttttttttttttttttaaagagacaaggtcctactctgtcgcccaggctagagtgcagtagcacaatcattgttcattgtaaccttgaaccactgggctcaagcagtcctcccacctcaacctccagtgtagctaggactacaggtatgtgctaccacacccagctaattttttaaaaaatatcttgtacaggtgggggtctcactgtgttgcccaggctggtcttgattgaactcctggcctcaagtggtctcatacctcagcctcccaaagctctgggtttacaggcataagccatcaggcccagcccacattttgttttttaaacaagtctttatcttttggagatacatgctgaaatatttatggatgaaatgaaatgttatctggggtttgctttagatagagaggagataatagatgaaacaatcaacttattagttggtcattgtcgatactagataatgaataaatggacttctttataccattttactttcatactttatttgaaacaaggtcttgctatgttgcccagctggccttgaactcctggcctcaagagattctcatgcctcagcctcccagagctttgggattacaggcatgaaccaccatgcccagcccataatagaaagttttaaattttaaaataaaagtattcatagacttggctatcatggatcctggtaaagtagactagtgaacataatcagatgtttcagtctttccctgttgatactgcttgccctctgagcccatttcctctcctgatcatcgcctgctatttccaatcaacagaaaaaatagagtagcctacatatataatgagtttatactaagagggaaattttaatattataaagaagtctatacagattctggagagcattcctgaagagaagattgaggaagcaaatggattaattaatgtaatagtgtgttcagtgtgcaataggtaacattttatgatatggttgaatttctgaaaaggtatcttataaatatcagaccatatttaaggagacttccacctctactgataaaatctgcccttctctctccccctgactttattgctgcccatctgtagttttgatcttttttctctaggattctttgcctagaattgccatgggccttctggatctggaacacggatgaaggaagaggatgaatgtttttcagatgttatcccttatgggagtaatttgtaaattctagcttcttcgggtggggggaggcggggtgtgtgtgtgtgtgtgtgtgtgtgtgtgtgtgtgtattatttatttatttttttaagttaattggcctcttccagcaaagagtatacagcagagacctagaagtttcattttttgtttgtttttgttttgttttgttttgtttttgagacggagtctggctctgtcacccaggctggagtgcaatggtgtgatctcttctcactgcaacctctgcctcccgggttcaagcaattttcctacctcagcctcccaagtagctgggactgcaggcgcgcgccaccacgcccagctaatttttgtatttttagtagagatggggtttcaccattttggccaggatggtttccaactcttgacctcgtgatctgccaccttggcctcccaaagtgctggaattacaggtgtgagccacggctcctggccaagacctagaagttttacgtcaaattttgtctctgcagttttctgaggaatgagtatatgtgctcaaataatagctaagtattaagtctgaaatattctagaaaaacagtcacaaagtagttatgcctaggatgtttttgaatattggtactagaacaaatggattcctactagatttcctttttactttcatattcagatgtaggaagagttggaattcaaaatgtgaaaagcagtcttgaatctcagtaaattcttaagaaattcttaattcattgaagagccattggtcgtgtgtgttttttggggagtgtgtgtgtgtgttgttgttgttaagaattcggggatgagtatgaggctatcattgcttctacaaggcaacttaatgatagtttgctgcttggcacaacaggtgaaagggcctttctagagcagggatcttggtttccctttttcccacctagtagtatcattccatgtatttaccaggatatacattgtttagtcctgtcttggctaaataggtaatggtccttaaggacataaaatggaaggatattgtgcagaagaattactagttctccgtagtgtatttttttactgtattctcctcatcaacagatggaaaatttttaaacttagaagaaaaaacaagtgtttttctccaaaagattgagaaccactgcttttaagttattaatggaggtcttcaatggatttgttaaaaatctggagcatggattttttttttttaatttttttgttattggttactgagtattggaaaaggaaatacagtattcaaaaacagtaatgttcaggatttggaactattttactcaggaaaaaataagtttataaatagacattttaatgaaaaggaaaatagcaaatttatggaaatctgagatagtctgtgttttgcttcactctgtttagtgctagaattctggactttgtttggggtcaaactctgatatgacaggaaaactaacagatgattaaaagagacagtaacataaatgggaaagtttaaatatggtatatggttttaattatattttgtataagaaagcagtttataccagttgtattcctaactaaaaagtactattttatcagtttcctgggactaatttattataagttaattaatgacatgagcattttggcccaaatacagttgaaatgttcattgaaactggatcaaagatgagcatatgtgtcaaggctttaaaatcatttttcatattaagatttccagagaaagtttttgtaatatataagttaaatatttttaatgctttagatgacaggaactgttgaaggtcctggatctcataacaagccactagctagctgatccaaagacatttggccccatgggcttctaggaagacaaatgtgcttaccatttcaaagattttattttgctcagtaacctactagacatatattagtgtttgtttgagttggtcgttgtcttccattgctgttattttattattattatttttttaattttagagacaggatctccttgtcacccaggctggagtgcagtggcacagtcatagctcactgcagtctcaactcttaattaggctcaagggatcgggatcctcccacctcagcctcttaaatagcttggactacaggtatgcaccaccactcctggctgtcttattgtgttgcccagggtggcctcaaaactcctggcctcaagtgattctcctaagtcagcctcccaaagcgctaggatacaggtgtgagccaccctgcccagccccattgctgttgaacttttttttttttttaaagacaggctctggttctgttgcccaggctggagtgcagcagcgcaatctcagttcactgcaagccacccaccgagctcaagccatcctcccacctcagcctcctgagtagctgggactataggtgtgcaccaccatgcctggctactttctttgtaatttttttgtggttcaaataggaatcttccacgtgcatccaaaatatttttggtttgtgacactcagtgttattattgactcatttttccattggaaggtgtgcctcagagtgggtgagcctttttgccctcagtcttctgtcagcactctaagactccaagtactctaagagattgctcactaaaaataagaacagctggccatctacctcaaatgtgagccgtcacttttgtgatataatcagtccttatctttagtacacagatttatggaatatcacactcactgtctgcctgctttggggtgtttctcctgtgtcattcatttttgtatattggcatatagcaaatataggaatgctgtgtcgcagctgtgggtcatgtatgtacttgcagttagctcttgctcccaagaatgcaagaaatttatcaacaaactcgtgtcataaaaatagtttacagtgatttttttcttaaaatatttcaatgattaagactttttttaataaccacaagtgtataattgtaaaacctaagcattactcagcaaatctagcaattgttgaattgcataagcttcttgttcattggaacttttgctaaagaattatgacctttgatttcttatcaccatgacctatcattatgataaacatgcccctcttatgtatccttatacccattataaggataaacaagggatagctccacccaccagatgtcatagacacaactggtattttggggattttgctgtagactaatcctggaaggaagagaggttatagataaaataagattggccatgaattgattgttgattaaagctgggtagggaacattgggttttctctggttttatatttatttgaagtttttcaccataaagttttttttttttaagataaaaaataaaagcatgaatagtgtaaacaaagttttgaaggagaaggaaacaggttagtagctaattaacaaaaatgttcttgttccattcaggcacaggagtttggactagcccaataagcattaaggaaaccattatttgtagatttcagataatgcaatgatagtaaccaaagttatgctctagaagggataacatcatggaagaatatagagtagattggagggttcacaccccagaggtagtgagaccagttcactgctattatataatgctaccttgaaatcatagggaggcgactgatgtggtttgctaaaagtctccaaaaatttcaaaggagaatagctcttcagtcaggtgctagtgccagcacaacaaaaaagagggttttttccctcatttggccagggcatggatttggaccatgtgggtgtcataatggagtataccaagtgattttgttcctatgatgaaagtgaagtccatattttgtctcctgtcttttagtaaatcagtatagataagtcttttttttttttttccccccgagacggagtctcgctctatcgcccaggctggagtgcagtggcgtgatctccactcactgcgagctccgcctcccgggttcacgccattctcctgcctcagcctcccaagtagctgagactacaggcgcccaccaccatgcccagctaatttttcgtatttttagtagagacggggtttcaccatgttagccaggatggtctcgatctcctgacctcgtgatccgcccgcctcggcctcccaaagtgctgggattataggcgggatccactgcgcctggccaagtctttttttttttttaattattttattctttatttttttccccacatattctaaaataagtctcttacagtgtctaggtttctttccaaaggtgattaaaaatgaagcatcatattttaaacttctgaggcagaactgctagaacaagagttttgttttttttttttttttgagacggagtcttgctctgtcgcacaggctggagtgcagtggcgcgatctcggctcactgcaggctccgcctcccgggttcacgccattctcctgcctcagcctcccgaatagctgggactacaggcgcctgccaccgctcccggctaattttttttttttttgtatttttagtagagacggagtttcaccgtgttagccacgatggtctcgatctcctgaccttgtgatcctcccgcctcggcttcccaaagtgctagaacagagttttgataatttgtttgaaacgaagcactcaaatcttctagtttatttgcatttgcagtcagacctctacagatgccagctagattacagatggctagcataagtttttttcattacagaaagaagaaatttagagcttagtgcggtctattaaaagaattaaaggttatgtcaaaggacaactataagaaagtactttggttctgaatattgcttcagctagggtttattttgaagctcctagcccaaatttgtagaaatgcaactaagatctaatatttagtgtgtaagaactttacaggacatccagtcagtagtagtcttaaaagtgaatcacataggctgaagcaggcagatcacctgagcccaggagttcaagaccaccctggccaacatggtgaaaccccgtctctactaaaaatacaataatcagctgggtgtggtggtgggcacctataatcccagctactcaggaggctgagacaagagaattgcttgaacccgggaggtggaggttgcagtgagctgagatcctgccattgcactccagcctgagcaacaagagcgaaactccgtctcaaaaaaaaaaaaatgtgaatcacatacataaacattgggaatttgcagataactttcattttagggtttctagagcgcagtggtgtaatcttggctcactgcaacctccacctcctggattcaagcgattctcctgcctcagcctcccaagtagctgggattacaggtgtccaccactatgcctggctgatttttgtatttttagtagagacggggtttcatcatcttggccaggctggtctcaaactcctgacctcaggtgatccacccgccttggcctcccaaagtgctgggattgcaggcatgagccaccacacccggcccacttacaggatttttctcccccttcatggttgtataaatgcagtacttggcacataggcaaacctgaacagtttgcaagttgcctacccttttctactttggataaaataaacctcttaaaatagcacttaacatagtaatatatgtatattaatagtagttacttcatgtttgttgaatgaatgaatgaaaaaagtagcaaatctacataatataaatcccaagacagccaggaattttatctggacctaattgtcttacatagcaccaattggtacttaataaaaacaaggctgggcatggcagtatgcgtctgtggtcccagctacttgggaggctaaggtgagaggatcgcttgagcccaggaggttgaggttgcggtgagctgtgattgcaccaaagcactccaacctgagtgacagaccctgtctcaaaaataaaaataaaaacaattagttataactcagatgttgctatctaaggtaagtagtaattactataataaacaagctatatattaacatcttaattttctttcctctgaactttactactgtaggtgtgtagtgaacttcatacaagttaatctttttgtagctctatttcttcatttctgtttgttcatcggttggagaaattttgcttaaattaatgaaagtaaaaatacagatattaatggctcataaatgtgcacaacccacttcatctatagtaagtaaaagtggctcccattttggggtttgaaaatgaagaagatctgaattcacagagaggaggcacgtgtagagatatgagaagttcttttcctactctactttggtacattggtctctaacacatgttctgagcctcagaacacagtagaacagaaccttcagaaagtgttgagagtataactctttaaagaggtttagtcagtctaaattatttgagggcatcatctttatttggtacttagaagtctaaaatcttcctgattgttgttaaggttacaaagagtctgtgtattgttggttagttgagcagtaaatacctttttatcattgttaaatgggttgtaaataaaatatttttcttcagtgttaaaataatttatgatcacaatatttagataataataataataattctgttatttatgatatgtagtcttatcctactgccactcccctcttctgctccacatactactaagtatgacttggtctctataatacgcactaattatgaagttttttacggagaaggaaattcttaatatagactaggattttttttcagttgtcttttaatggccttttattctagtaaacttagatttcttatagacatcggtttattgtgccgagctcagtagctcctagagggagtataaatttaggcaaaggaatcaaggaataaactggtattgtagaagagatgggagaaaaggaaatttttatttttgctttaaattactaaatcatgatgtttcctgtctctcagtgcttaccccaatcagtgtttctctcttttcttttttcctttcagtcccgaacccctaaaattctttgcttgcattaacttgcttcagattataagcctaattttactgttccaaatacatgaacttttcactgtatctccaagtgctcttttagagttcatctctttgttttccagtaactcatatttgtttcttcttatgcttaacacttctctctcatttttttttttcatgtttctcacattttttctttccacattatctgctgtagcaaacttgaaatatatgcttttggagaagagtaaaaacagtgtttagccatattcaggttattagcagcagctcctctttcttcacatatacttaaagggaccagaaagttatttaagctcttacttgctacaaatgctgttccatgtgctcctatgagtcagcacaacaggtattttttttttttttattgtacagatgagaaaactgagactttgagacattctatgaattgcctgagctagttggcagcagtgccaggattcatagaaatttggagcaggaagacaacacaatgaagattttactttgaggaatttagggttcatctatgtaaagtgatttttctgaggtcactaattatgttgtaggctagaactcaagtctcctaactcctaatatagtgccttttttttcttttctttttttatttttttaggagatgggtctcactatgttgcccaggctggtcttaaactcctgggctcaagcaatcctcctgcctcagcctcccaaagtgctaggattacaggtgcaagccaccgcacctggcctctaagagtgctttttcctagcatacttttcttctcctaaggtaaaaggctgtttgtcatggtacagctacggtgattttacttgagatatttgactttgagatggagatgaagataagtatataatgcagctgccacattcattctcatacaaggtaaagtcattcaaaagataaatcgaagaactatagatgtatttaagaagaaattcagcctatatgtaacaacaaaattttgaataatcaagttcagaaattggatttttaaaaacttattagctactttaacccttttgaaatattcccaaaaagtgttttctcttcctgagttaaatttattcatttattgacctattaaagatttttttagtgcttcagagctattctgtatatctgttcattttcgttatttagtagtatatagaagtaatagattgggctgaatagatttatttcaggatatatcttagatatttgtgttttttcatgaatcccagtttaagggttattgctttcaaaaggaagaaatttggttagtcatgacttttggctagttgaagtttagagaagtgctttatacaggatcttttatttagtgagaaaaaaataactttttataattttataatactgtgtgaaaaacctgataccaaaacttctgaaaaagaaaccaggcctaggagatgaggattctagggaagattattaaattgaggatatttttaagttagattctaaattagtaaatcgtggctaataagatgaaaataatctgatcctttagtaagatctgaagtaatattgttgccctgcaaaaaagtggttgttatcagcataccttatatgtcagcctaagcaagattagattttctcttttctctgatagatgccaatatttaacattgacttttatctactttcaaaaatatctatgaaatatactttctgtctctgaattagagtgtatgtatatttgtgtttacttgaaatgttatagctggatgatagatttcagagcagtttttatgcttagggaagccactgcctcccaaaaaggttttcttatgagaatgaggaaaataagtataaattttcatatttatgttattactattgatgtgcttggataattgtatttataaaagtaaaaaatgttcagtattttatctgaaatttaataatggatattgtacagcctaaggaattaaaagaaaaaggaccctttgagaaaatggcttgttcttatgtatcttaatatatactgtgttcactttatgttttgtcagacactgaaattgaggaagagagattttggcgttctgttggtttatggagagagttgatcagagattgctccttggctgagttgctgtctgcataggctgttaacaattgtttctctggcagcagatcttgttcatcaggattgcatcatttctgggagaatggccaaggtccacagcctcaatacaaagactgtctgaagcatatgaggcctgttctctttctgaagcggcactcctcttcctgccagtcctcttcacaggattactgaagcagacttgttctgaatttctttcgttggattggttgtttattggacttttgtctgccagctgcttccgcctcacctgtctgatgcaatttcttcttctgaaatctgttggaattgttcataaaacactttttgtttgtcttctctgtgagtgaccagggagatcatacaggtcttgtgctttcagcaagtcatatagagaagagactgtcagaatgatgatacagagactgttggccatttctgaaaccaattaaaaagatggggtaattaagaaacatttctggcatgttctatttaacatccttttccctagaaactgtatgtaaatggcacctcctaaagagagtactcggtactactggaagatacaggctgtgtctgtttctgaatccaagaacttactagtgttcctgtggattctgatggattgttctggaaatagttaaattaataataaattgaaactgtgatgcattcatttaccccctactgtacactcacatctatttcgctgttttcctcctttcctttttttctttcttatttgctattgcttcttccttgatttactttatttcttccttccttttactgttactttgatacttttatttctctaattctgggtgtactattttaaatcgtttctaaaaaatagtttattttccagttttttaaaattagaaatcataaaacatcaacataaatgaaatgcatgcgttctaatgcttggtaactggaatcctatgaatagctcttttcatgtttatgatatgttaatctttaaggtgttaataactctggctagcgttaaatttgacttttaggaaaaaacaccagagacttaaaggatactgatcattttcccttcctttttggaaggtagaaaattaatttaagcgccattttttaagcatgtttccatttgaccgcaaatagaactgactcctttttatcactcttttttatagtaggacaagaaactagatggtgtggaatgaagggaaagaaaggagtaataaatatggacttgtaatttaatgggtgatgatggccccttgtctggctggacagttgtcggacatcgggttaaagaaagaactctgaatttgagaagtgttcagtgaagaagggaagcaccttttaggagagagaaaaagaagggatcccttggaaaatgagataattctaatttgaaggaagaggaaaaattagccagtgacataagtatttaccatttaagtcaaataatttccttctctaccatctcgtttctggctttatggaaaaataaaaaattaaagggcaaaaaattcagtgccggatggacgtagggtggtaaacgagatagtatagatgtaggatgataaacaagacagtatacagaaacataatatagctgtagaattccattctgtgtgttcatcaatgttatttctttctgtactaatttttgtctcaactttttctaggtcttcagaactactagcagataatttggggggacttcatattcagaagtctatataaaggtgactgacccaagtaaatccttttaatttctgttttattttttgcattttaatgactgctggaatcatgttgtagtaaattgtgattataatttacttagcagatatttctggaacttctctacgtgtcagttattgttttggccattgaaactacagcagtggataaaaatccctgttctcatagagtttatattctggtaggaaaaaacaaacaaattataataagaaaatactgcatttagatgatctgttaaatgttcctcggttaacattttaatagctacattttacagagttacttagggaaggaactattcttagggtaatatttgagaaatttgggattattaacagaatttgaattaagaagcctcatcattattaaagcattagttagaatgagatggtcaagctaacctattatggttgctttcatcagaagaatgaaacagtcatgttaaactagacacaaggaaaatggaataatttttatgaaatagaaatttatagttaccgacaatgtttctttttttttttttttttttttttgagacagagtatcattcttgttgtccatgttgaagtgcaatggtacagtcttgactcactgcaacctccggctcccgggttcaagcgattctcttgcctcagcctcccaagtagctgggattacaggcgtccgccatcgtgcccggctaatttttttgtatttttagtagagacagggtttcaccgtgttagccaggctggtcttaaactcctgacctcaggtgatccgcccacctcagcctcccaaagtgttggaattacaagcgtgagccactgcaccgggctgacttaatgtttcttaaggattcatcaactatccaaaatagctgggttggtgtttcattagtgaatgtagcaatcatttattcactcattaagatgttatctgaagtaacttttccatcttttccttttagtatatcttttaaaaattgctctaggaaaaatatcaactatcatcttgggtttataacttgtcttttatctagaaactgtactttttttttttttttttttggagaaagagtttcacttttgctcaggctggagtgcagtggccctgtctcagctcactgcagtctctgcttcccagattcaaacgattctcgtgcctcagcctcccaagtagctgggatcacaggcatatgccaacatgcccagctaatttttgtatttttagtagagatagggtttcaccgtgaaaccatgcattttttaaatgggtgtacagtcgtaatggctacaacaaagggtttttaatgatattaagtacggtttttggtttaagtcttttactgaaaatataaaacaattcagattccctttgctgatcaggggaggtacggtgataatcagactttcatatgattatctggtcagacagctttggggcttttcttttaatctgaattatacagtaagactaatagaaagagtagtgaccaacagcccccagtatttaactgtcttttgggtttacttgatgagtgttcttgttttatcatttacagattttacttcaatttcccaaaggcttagaagatgtactgccaaggtctctgtttggatatactgttagggaaaggaaacatacatgtgtaagactggcctaaaggcaaaaaagttcatcagtccctttttttttttttttttttttttttttttttttttttttggcaacagggactcactttgttgcccaggctgagtgcagtggcatgatctcagctcactgcaacctccacctcccaggctcaagcaatcctcccacctcagcctcttgagttagctgggactacaggtgcatgccaccacaccagatttattttttttttttgagatggagtctcactctgtcgcccaagctggagtgcagtggcgtgatctcggctcactgcaacctccacctcctgggttcaagagattctcctgcctcagcctcctgagtagctgggattaccagcgtgtgccactacagctaatttttgtgtttttagtagagaaggggtttcaccacattggccaggctggtctcgaattcctgacctcaagtgatccacccaccttggcctcccaaaatgctgggattacaggtgtgagccaccgcgcctggcgcacaccaggtaaattttgtatttttagtagagacaggatctcgccatgtttcccaggctggtctcgaactcccaagctcaagcaatccacctgcctcagcctcccaaagtgctgggatgacaggaatgagccacttcatctggcccagtcatttcccagcccagctatatgtcacctccaattgggtgtaggaacaggcgtattgtcatacccagaggtctcacttcatcatctaggctggagtgcagtgcatgattatggctcacctcagcctctacctcctgtgctcaggtgatcctcccacctcagctcccaagtagctgggaccacaggcacacatcaccatggctggctgatatttttttactatttttgtagagttggggtctcactatgttgtctcagctggtctcaaattcctggactcaagtgatccttccaccttggcctcctaaagtgttggtattacagttgtgaaccactgcacccagcccacaattttttttatttgcattaatatcaaagtaagattggagcatctcagaccatctaccatttacaatttacattaaccggccaggcacggtggctcacgcctatagtcctagcactttgagaggctgaggtgtgagtggatcaccggaggtcaggagttcaagaccgcctggccaacatagtgaaacttcatctctactaaaagtacaaaaattagccagacatggtggcaggcgcctgtaatcctaactacttgggaagctgaggcaggagaatctcttgaagccaggaggcggaggttgtagtgagccaagattgcgccattacacttcagtctgggcaacaaaagtgaaactgtctcaaaaaataaaaataaaatttacattaaccccctgggttgactcagtcggtatcatgtacttttcattcctttagtttttttagtattaataattgttctaatgtcttattatgaatcagtgtatcagtcatgactctctttgtagtcttttttgcaaaagtccttgttaacatgggtctttgacattcacattgactttattcccccccaaataaaatgctttttgtttcatcctttcaatgttttttacactactgtaaaactactaatgtaaagtcacacaaagaacacttgtttccctctgcaccatacctccaaatctcttaatctatttttgcatttttttatacttcagtaatttctgagtctttctgttcccagctttcactggtttatggtcaccatgtcaagctatcctcaccgctttttcatacacagttgtttagtctttatcatgaaactgtactcttcgtgatttcgggggtttttttgttgtttttaaaaagtagtcaacttttttagagcagttttaggttcacaggaaaattcatcaggagatacagagatttcccatgcaccctctgcacccacgcatgcatagcctcctcctggtttatatttttgttcatatctagcagcgtattattaccccacaaataaagttgctaagatgattgcatcttctcccaaaattatagttaagatgatttaaaagaaggaagagagtgttcaatgacaaaagaaggcactaagaaacagctgtttccaatcaagtataaacaacaaattgatctcttttaatttggaagaaataacattattgactgcttgtgaaactgcatttatttgtggcctaggaaaaaaacttaaatgaagatcttgaatttttaaagagtttaggtaaactgggatatttttaataaccatcctttatcttaaaacttgtttgctatatcctaggctgccagaaaattttgtttgggcagttttagaatggggagaatgtgttggttagtgagataggcagactcttcctttcccttcaactgaaaagaaaaacaaaagtaaacataactttttgccccctactttgtgaaacattaatgaaatgcatagtaaacatgggacactgtggctgtatttattttataattatcccttaaaagccttattcaagaatgcagaaaaatattcagtaacatttaagataaacttgaagaactatctgataactaggtatttattttactagatattttccttttctgttacaggattcctcatgtccataacatgttggatgaggctctgcagctcacccccactctcagagtggtcagtctccattaattggaccccgtgatttccaatctctgctgtgttggacgtcatgagcattgcaatccctctgggagtcaccacatcagatacatcctactcagatatggctgctggatcagagtaagtgctactttctaggtagtaggtacattatcagtctgtgtggagacagccttcttatggatagctaataggataatatgtagtattttcttaaccagatcctattccactgtaattaacattagacctttccctttacccccattgaaggtggtggaaaaaaggaattagaaggggaaggaagagttttcagaggggtatttctgggcaaataattaatagaaccaaagttgcaaagtaggaattcattttcatttgttttaatgggtggagaaaattggaataaagtaggtgttactacctgcttctgtagagttaatgattctgatggagggagataagaaggtgttctttccaactgattttccttgaagtcctcttcctatgtacttcccattgttctagagtaaaggggccgaaactatatgggcaggttgcctagaccttctgacatctggggtagaaaacatggagaacagcgtcatctgtttttttataatattcgttgcctagaaagaggaccttcaaaatcagtggtaccaaacttttttttcagctaagagcagctttaggaattcagagtttgtccaaaggcccaatccctaaaattatactctcaattcttgaagaatgtaaatgccaaatgacaatgaaggtaggccttcattatacaactttatatatattattcacagttttaaaatttttagtcttttgtatcccttctcttttaagttgtccgagattccccctgctcacagattccccctcttgtccttttacctcccttgtacccaatcttccttgcttacagaaaggaagtggaagccccctacctttcaagacgaagtggcactacaccaggatgtgaaagtccagcgaaagagacccaaggggcctagggggcagcacacccccagaagccaagtctattccaggcagtaccagggattagggtctgggctggaaaaatcctggtgttttgaatatgttcaggtccagttcagactcttgatcccacagccacttcttgagtgaggtgggtgttgctctaattcccctgtttctcttgccattttcacagtccctggggattcttcccccttcagcaaagcaaagcaactgtaccagatttctgggttgaatgacatccctgattaataagtggttttcttccttaaaacagaatattattaaagagcatgtatatttcttcataaagccacctaatataacttacctgtttactgagttccttaaagaggaagacttaaagctaccctgagaaatagtatataatattctggggtagtctaaaatgaaaagcagtgtttgggcttattcccatataaaaaggagaaaggagggttgggggtggggaagggttgattttgtttcttctagagcttttttcttcttttgtttttgtttgttttgttttgtttgcatgcaaaaggtatttagttatgtcagtaactgagacttacttaaccattttacaactctttccccaaataaagtacttaaaactctccctgcattagtaggtagccagtttgtattgtgtttataggtttttataaagtcagctactaacctggtactatgtagattg

SEQ ID NO: 359 - DNA, 16336 bp, Homo sapiens
  source 1..16336: mol_type = genomic DNA
gtactggcaacgaccctaaacatgttaccaggtcttatccattccccgttaatttgcaccacccccaaacactacattcgctttggctcaccctttatccctgagagacgtcgaaggccccttctgcctgatggcacattcagctcctgtaagaaggtatgtctgtgtttttgtgtgtgtgttgtgtttatgtgtgtgtgctttatttttttaagcctaagattcctatcatcatgacataaataaaatgttctctagatagccactctgcccatgtgagtttataatgagttagttgttcagccataaatactgattcatcaagagtctgtgagactgtggtggaatgaatgtactgcatttttagtgctcagatttgtgactggtcactgatgtctcttctgagaacccttgaggttcctgagtgagagcacacagcagtggatgactgggtagagacggatatgttttgtgtgtgctcttgtgatatgggttaacatgtccatttatgattattgtgtgagattaggccctgggtcctctagaacactgttgcataaatgaaaaaaattaaattgttttgaatcaattcaaccgttattatccactatcatcacttgaaggaaattagaggaaaaatcctattgtaattggcataattcctgttccttgatcaaatgacaagtcggactgtttattccaagagaatacagaatctaccctaaaagactctctttccctctctgtttctgcctctttctcctctttccagttacttactgtttttggatctagtggcagtagcgtttggtggtgtttttggaatgctctttcttaattcccagaagccctgcatattttccaaaggtgtctcttaggaatagatcactccctcagatctatgatgtcgttttccatgtttctagaagtataggacaccctttcatttggtcttcctttgaggtagagtctgttccctggaacacccttttctcttatcctcagatctggattcaggctgccttcctcagtgtctgccattgccctcctccactggcatcacgtacatgaggatgctgcatgtagattatttgatgtgatgaagtctccaactccaggcaggtcttccctgactcctccaaacttaaaagcttttctctttccccaaagaacagaagttatttctccgggggaggggggcatgaaagatgagccaaagtggtgtgggatatggaggggaggagggcaataggaatctgcaaaaaggaaggacactactgctgaatgagcagcacattgcagaaagtcttttcctaattgcacatcttacctaaacattggaatcactcattggtttgttcggggaaacgctcgtagaattcctaaagagaaatttgaccatttctaaggatgttaactgttgaagcatcttatcaagccaggtcgtacaatctcctattttggtcctttaaggagtgtaggcaattatttattacagataagtaatgaagtctgagctgcaaataatatgaactaggctcttgaattgaaattccttcttgataattctaatgctgggttgcagtctttctgtttccatcttttccaactagcagagacttaacgaaaaccaaaaacgtgtctaggactgtaacttcagatctggtagaaaatgcatttctttaagcttttttaacttggttctgcttttatacttgtatctatagcacatccttaaatttctacgggcaacagatagaaattccatttaacacaagtccctgttatattctccaagtgtatctgactatccttaatctcatttatacaggctctactcaagcacttttatctatgtgtcatggttagtctttaggaagagtttaggctgcatacacaggattatcataacaagactatttaaataggatctttaaaaactgtttaagtcattgctttattgtgtgctgttcacatatcaagattctattttttaaaatacagctttttatgaggcaaaataaaatgaaatggaatgttttagctagaatagaatttggctttatagcagtgaagaagagttcttcttctaatattggtcttcttctaatatctcctaatattggttagaaaggacttacctaatgcagaacctaagaacattttcattattcaacaaaattgtaataaaattctgaaaatccctcagagtataagttaatcagatagataagaaaaccctccatgggattatttagaacaatgtatatttctaataggctcactgtttcatatctcactaaagaggtaagggcctggccttgtaagttaaaaacttaccagtataggacaaattaaagttgtatctgtatagttgtactcagattcttatgctatttatttttatttttatcattattattctgcaacttctgaaaagaagaggagttcaggtatttgacagaacattttatgatatccctagagtttctaaattgaatcatagtttttaagaagcattttgcattttttagttcctcagttggtattttaaaaacatttataagtggccaacaaggctctcagtagtgtttcaccttgttctctctaaactcctcttctaaacacaatgtgtatagggcatttggtctccagacttcttagaaaaaccagtctgactgataatgaaacagtgtgctttgcattgataattaatatttcattttatacactggagcattatctgtaaatctccaaacatagcattgaaatttagttgaaccgggactcggtgaaaatctgctcagtgttcagtactgtactataagctttcttcacatacattatctcacttaccatgcatgaaattgggatcattgtcctaaatttatatatccagaagctttgtctcagaaatgtttggtaacttgtccaaagtgaagcagctaataagtgacacagccagatttcttctggtgggggatagtaggggttcacagggtctcactgttgtccaggctggagtgcagtggcatcatcacaggctcactgcagccttgacctcctgggctcaaatggtcctcctacctcaacctctcgtgtagctgggaccacaggcacaccaccacgcctggctaatattcatattttttgtagcgacagggttttgctgtgtttcctaggctgatctcaaactcctgagtgcaaggagtctgcccaccttggcctcacattctgctgggattacagatacgagctactgagcccagcctcacagccaagtgtcaagccagggcttctggactccaaaacctgtattgcttccttgctctttcgccataatagcgagacctttaaaatatttatccatctttgagcctcccagaaaactcctttgcaatatattttaatagaggttcagagaagggagaaatgttcttttgattttaacaacttgctgagtaggtgcatctaaaattaacttattatccatgaggttaattgtatcttgttagatacaaacaaatgtccatgttccttttttatatgagtcctgaaatattgtaaaattatacaacagaacctggaggagtaggtttgattgtatttgctgtgtttcacctcatagctaaccatggtagcatctttcttctagaatactcctgttctgattttatgttccctttttgtagtcatcagatccagaatgtaaattattttacaagtacatctactagaccctggaaatattaaaaaattactcagataggaaagcttagtgaccccaaatgagtgttttctgctttgaaaagaaaaacttaaaggtggccataacaaaagatttttcactcctgagcctaatttttccatttataaaatgagtgctttggacaagatgacttctaagttctcttctaagctttaaggctatatgtatggttctgacaattcatctttacatcattattctgtatctaagatagttcattcttcggattttttattttgtttttgtgtttgcttttcagagacctggttgtatcctaaaatgtttacgtgattcaaattaccattgagagctcttttttatatccttgttcactcttccttccaagtgtttacaggtttacagtttcagttttgctttcatttggccagccacaatgacatttgtatgatgtaagatttttttttttttttttttttttttggtaaaatttttgtggattgtttcctaggtttctaagagggaaaatctatgagaattgctctctggtgaagagagtatttacttacctgtaatacatgttctctaaaggtataaattataataattcacctttgctcttcctattgggggagggtcttactcagaaattgatgtttatcaaaattcgatctgtcttatgtcagggcaggagagccacagagtggtgagcaacctacaactgtatatcttaagagaacacaattacaggtaagaaattttctgtcttccacaggatacataatcttattatcctaatctttgcaggtttactatctggcctaaatttatttcttgtcagtttattattctaatctttactaccaaaaacttgtgactgataggtcttctttttgactttttcccttttttttgatttctactgaagctcatttcgtgatttgcattactcatgcataatttaaccaaactacttgttggaggggggagtcccataggttatttcatttgaaataaaccttttggaaacgcttttggtacctgtagtgaagagctattaatcctcatccaaaatcttccaatgaatcttttttattacctcttcacacgtctctagcacggggcagacaacttttaagagatctttatcttccttctaggcgcttattttatatattagttttattctatacgatcacagtctctcctaaataaatgttaagatttcttcctcagtcttgccattttacaccatcccaaatggtatgaaaagttgaatagcagtcattttttattggtttttgtcttttgatgggatctcattatatgtaatccagatttcctcaagtttttcagttaaaaggaattgataggacaatgttccaatatgctgagacacaagacaataaaatgcttgactgtgtaactgaattagtgtgttgaattgtatcactcaccagttgatgtacatttaaaacaggtgcactaaatagttttagataattattgataattctctggttcttttcaattatagcgctggataaaacaagccttagaagaagggatgactcaaacatcatctgtaccccaagagactagaactcagcacctataccaaagcaatgagaatagtagctcttctagtatctgcaaagacaatgcaggtacgtatctaaaacctttctgattatatgaccaatgattgtttcaggtctgcataaaaaatttaagtatgagtatttctgatacaaaaagaaatggcgtgttttctaaatagttactttacatctgtctttacagaggaagagagagatctcaagtcagggatcagttttcccaggacgacaaagaaggactagacagtgtacagataacagcagaaatggttataaaaaaggttagatacatttaaagtagtaagtttaggaaatttatattcatatttataagatggggcaagggcaagaaagtggtggaacactaatattcaggaaagaattaaaattctgagtgattaagttgggtgggacatggttgagggagcaggggatgaatgaaataagtgaaaaattattatcaattgattgttttcaaaggggcttgtataattagcatacaatttttaaaagaacagccgggcgctgtggctcgcacctgtaatcccagcactttgggaagccaaggtgggtggatcacctgaggtcaggagttcgagaccaacgtggccaacatggtgaaaccctgtctctaccaaaaatgcaaaaattagctgggtgtggtggcaggtgcctgtaatccctccctaaacaggaggctgaggcagtggagaatcacttgaacccgggaggtggaggttacagtgagccaagatcacgccactgcactccagcctgggcgacaagaatgaaactccgtctcaaaaaaaaaaaaaaaaaaaaaaaaaaaacaaattttttaagacagctttaaatctaaagtctttgtgcatttttaaactagatgtcaatgaaaaatcatctgttccattggttttgacagtgacttgcaaaggatgtaattgaaagcacttgtgatatcttaatgtattttgtgacaatctttttaccagtttctcctgcaaatatcagcttaattgaaaagttctttgtgattttcataacttttctctaaatcagttttttaaatattagacaatcaaaataccaaagtaaattagatgctaaagcaacctttcaggttgcaacaaacagaatatttcacattttcataaaaaacccacttcattgttcctgtttaccaacttgctgaataaatgtaatgaacttgaatttaattagataaatttttagtagcagatattgcaactaaaatcagaacttttcttaaagttcttacttcatttggattttacttctttttagattttatttcagaaaacgtgaattgcctttttttctttttttcttttttttttttttttttttttgaaatggagaatcaagcgattctccctgcctcagcctcccgagtaactgggattacaggcgcccgccacctcacccggcaaatttttatattttgagtagagacggggtttcaccatgttggccaggctagtctcgaactcctgacctcaggagatccgcccacctcggcttcccaaagtgctgggattacaggcatgagccaccatgcctggctgtgaattgccattttttaaattatggatttagtttattcttttgtctctagattagattatacctcataagttaccacctatatacctcaggataataaaattccagttatctgaaagataaattatactgtttatttaaaatattttcttctagtattcaccaaaaattagggatatttagtcaaatatgaatagtataaagaaatcttggtaccagatttccatttgtattatttcttttttaacagcttttaaggtgttagtaagaatataacttagctgaaatagactatcatgtttgtgtatctatctggtgtgtgtgttaatgcatgtgtatagttaaggttgggaacaggagattgcatagcagttcacatcctgactagcaaaggattataggaaaagtgtctttgttatcacatgccctggttggaaggaaattaggattcctagtcaccagccttttttgttattgttgagcttctgccctagtctaacagtgagaaacactcacaggacacaccttgcccttaaaaagcaatgtaggaaaatatttgattttaaaaatcaagcagcagtcaaatgcgcaagttatattgctacaaaattagcataaattctgaggaattacttttatttgttggctctcttttgtttttttcaagaataccaaagagacattaagaaaggggaaaggatttctataatagaaaaaatcaaacagacctttacttgaaaaccagctgtcccctttactaactatatgatgttactagaagtctctgaggctaggcgttggtggctcacacctgtaatcccagcactttgggaggccaaggtgggcggatcatctgaggtcaggagttcaagaccagcctggccaacatggtgaaaccctgtctctactaaaaatacaaaaattagctgggcctggtcacgtacctgtaatcccagctatttgggaggctgaggcaggagaattgcttgaacctggaggtggaggttgcagtgagacgagattgcgccactccactccagcctgggtgacggagggagattctgtctttaaaacttaaaaaaaaaaaaaaaaacaagtctctgagcctcatttgtaaaatgggaatagcaatacctgctttatagagctaacattagaatgaataatgtatataaagttctcaatatagtatcaggcccataagagtaattattatacggtcattattctacacagaatactctttcttgtagagtatttgtggattaataaatacattaaagattctggctgggtgtgatggctcacgcctgtaatcccagcactttgggaggctgaggcgggcagatcacgaggtgaaaagattgagaccatcctggccaacatggtgaaatcccatctctactaaaaatacaaaaaaaattagctgggcatggtggcatgcacctgtagtcccagctactcaggaggctgaggcaggaggattgcttgaacctgggaggcagaagttgcagtgagccaaggtcacgccactgcactccagcctggcaatagagtgagactccgtctcaaaaagaaagaaagaaagaaagagagggagggaagaaagaaaagagaaaagaaaagaagaaagaaatacactaaatattttaagttcctaaaagctgaaactttatagaaataaaagttattatcaaagtagggcaggggcatgatgttcattatttgtaaatgatgtgggtctattcttagaagagcctaagtaatcagctgaaaaacttagaattaataataagagtttaggccaggcgtggtggctcacgcctgtaatcccagcactttgggaggccgagatgggtggatcacaaggtcaggagatcgagaccatccttgctaacacagtgaaaccccatctctactaaaaatacaaaaaattagctgtgcgtggtggtgggcacttgtagtcccgctactcggggggctgaggcaggaaaatagcatgaacccaggaggcggaggttgcagtgagctgagatcgcgccactgcactcctgcctgggcaatagagtgagactctgtctcaaaaaatatatatatatactaataataataataagagtttattaatatcactggatagaaggataaatatataaaaagtgtaaatatattttaaaaaatcatttatataccaagaaagtaaatgaataccaattttttttgttcccaaacttaacaaaactaagaaactgcctaggaataaccttagttgggtatatggagtaaactgttactgagaaatatttttaaagtctgaggaaatggaaatttctttttctttttttttttttcatgaatcatacgtgagcctttgataaatttcatgttcattatggaaagaatatatatatgtgtatatatatatttctttctctttctctctgtctttatatagttcccatgaaactgccttgtttttggaatttgattaaatgattctgaagtctacctttaaaaaaataagaaaaaaattgaaaaaataataatgaagtactttctcttgaggtgtaagacgagcttctagtatgaagctaatagttaaatttagtataatattgatgcaagaatggatgtatatatggaacaaaatagtcagaataggcctaaatataaatgtaaaagttggtaaattgtcatggaatttttagttaggagattgaaaaagaattagaatctagctggacacggtggcacgtgcctgtaactctcaactacttgggaggctgaggtaggaggatcactcaagcccaggagtcaagttcaacctgcgcaacacagcaagaccttgtcttcaaaagaactactaggtcctttgccaaagaaaattctaggcacattcaaatatatatatttttttaattcaaacttgggcctggcatggtgactctcacctgcaatttccagctctttgggatgccaaggcagaaggatcacttgaggccaggaatttgagaccagcctgggcagcagagagagacccacatctctacaaaaaataaaaattagccaggcatgatggtgggttgcctgtagccttaaggaggctgaagtaggaggatgacttgagcccaagaatttgaggctgcagtgagctgtgataatgccactgcgttccagcctgaatgacagcaagacatctgtctctaaaaataataaaataaataattcaaactgtattaaccatgtttttgtgtctatactgcctctgtattaatagaggattagtacattggggaaaggatttgcagtaaaactgccggggagtaatatccctgctagcaatctgataaaatttatcatgtgcattaaaaatattcataatccttaacctagtagtcgttcatttgttctgcttggtatctttcctacagaaatagacaaagaaaccaaaatttatatataaggttggtgcaaaagtaattgcgtttttggaccattaattttaaatcactgtaactagactcagacacatctttattaatcaaaataggaaccactgcaatcaacacatttttgccactgagaaataagtttgtttattcctgtagcctaaaaatctatgcttcaggattcgacaaactcttggaaaatattttctgcatcctgctggttgtggaagcaccttccctgtaaaaagttgtcagatgcttgaagtggtacctggttggcgagaggtcaggtgaacatggcgggtgagacgaaactctgtagtcaaatttgttcagcagcttcagaagttgaatgaattgtttattagaataattaattcttagttattaacaattgcaaaaactataggttaaaaataatctgaattccaaccccaggaatggtagaatttgtaattttatctgcttgtgcacatacttgtaatggagtatcatatactatttattgaaaatcttatttttgattcattttatcaaattaactccctctacccccaaaaacagcgtagtaccacttttgaattagatttgtgatcttacctagcaccttgaatttgtaagaatattaaaagaatagccaggtgtggtggctcacgcctgtaatcccagcactttgggaggccgaggcaggcggatcacgaggtcaggagatccagaccatcctggctaacacggcgaaaccccgtctctactaaaaatacaacaacaacaacaaaaaaaaaaaccgggcatagtggcaggcgcctgtaatcccagctactcgccactgcactccagcctgggcgacagcgagactccatcaaaaaaaaaaaaaaaaaagaatattaaaagaagaatatacgatgactaaggttccttctaggaatgtaaggatgagttaatatttgaaaatttaataatcgtcatttgttagcaggtcaaatgggggaggagaagtcataacacagtgacttttatcaatttaatgataaaataacatactatgatcttttaatatctagctgaaaaattgccagttgtcatgcatcatgaaaactagttaaacatcaaaataggctatcaaattatcccactattaccattattatttaatatagtctaagtaattgttagccaaagtaattacaccaaccccctcccccccacaaaaaaaatcaacataagagatataagtactggtaaagagggttaatgtgttatcatgtacaaatactattatctacctagagagttaattgaaaaactggtagagattaatagggtaactggataaaaaataagtatgtaaactttttaaatgttaataacatttagataacaaagggagagatacgttttattcatagtagtaaaaaaaaaaaactaaagaactctggagagtaaacttaattagacatgtggtatatatagatgaagagggacataatatgtgaataacaaagattatgccatgttcctgggtaagaatgcttctcaaattactcctgaatttcatctaacaccaatcaaaatcctaacttttttttttttttttaatagtatgagcatggtcattgaatgacttctatagttcattgctagaatagctaaaatattttggagaactagaacagaataactggaatttccctaacaattttaataaaaagtatgctggtgttgattcagtattggacaataagtggaaagaataacattcggaaataaacattcagaagataagcccagtatatgtaagaatctaataagataaatatatttcaaattaatagggaaattatagttattctacatttacagaagattttggaagaaggtgctggctatttgttatggggaaaggatggattaattgctaccccatatttaagtatgttcttttttccttttttgtaatggcagtttgtcagtgtgaaataaaatgttcttttttaattaaaatctaaattaaaaattaaacatggagacaaaaggaaaataggctggcatttttacagtgtcagggtgggttagcaaagacatgatatcagaagcagaaaataaagtgatccgtttgactaaatagaaacaaaacatatagcagagacttgtaaataaaattgaaggcaatcagtaaactgggaaaatacatttgtaattttattgacaaggggtcaacattcttactatttaaagagcccttacagatgaagaaaaagaccccaacacctcagtagaatgcaggctgaagaacatgagccagcagttctcacaggactaaatataaactacacatatatagatattcttttgatttaataatcctacatgtagccatttgttctaatagcaaaaaatgaaaaaaaagttggttaaattttgataatactaatgttgtgcagtcattaaacctgaactgtagatttctattcattgtcataaaatgttgaccatgtatttctgagtgaaaatagttactgagtagtttaggtaaggcaagagtcagtgaagcaatgtctcgataaaaatttaccaggatattagcatgcgtttatttgtggatatgattttcaggttgtgtatgtgctgtataaccttggtaattttttgagtaaaggtgaaaaataataataataaaagatggatagatttgaccacataaaatttggaaactatatatgcaggaaaaagagaaaaagtaggcaaatgacttggctttctttggcctgtaaacttcttaagggcagacatcaggtctcttgttgaatacagtatcataataagtactcagtaaatatatgttgaatgaatgccttgtacattgatttgcacgtggcagatttcacctgtatcttataactcctttctacaactaacttcatcacttaacataattgactttgatagttatagtgttggacctagcagtacagagatctgtaagattccattgtttaagacccttgaaatattaaatatataaaagttattccgaatataagccatgaattacatgtttgtttctgttttatacctaggcactttttaaaaggaggaaagaaaatttagtatctggaacaaaaggaagatgtgaatatacttccaatctaggaatattaaaaatcctgagatatcagaaaggaaaaatatgcatcttcaataattttttgcatttattcttccctcttcatctaaacatctcctaccctagtttagtgcctcataattctttgctaactactgtgttaactccagatggtttcccagttactagtctcatactgaccattgcttccagataatcttcctggcccaaaaattttccttgaaggcctggaataaatgtcactccttccatccaccaagccttggggatatactttaacctattgattaagaatatagatagatggagccaggcgcggtggctcacgcctgtaatcccagcactttgggaggccgaggcgggtggatcacgaggtcaagagatcaagaccatcctggccaacatggtgaaaccccgtctctactaaaaatacaaaaaattagccgggtgtggtagcgagcacctgtagtcccagctactcgggaggctgaggcaggagaatggtgtgaacctgggaggcggaccttgcagtgagccgagatcgtgccgctgcactccagcctaggtgacagagcaagagtccgtctcaaaaaaaaaaaaaaagaaaaaaagaatatagatagatggggccaggcgtggtggctcatggctgtaatcccaacactttgggaggctcaggtgggtggatcacttgaggtcaggaattcaaggccaacatggtgaaaccctgtctctactaaaaatacaaaaattaagaatgtagatatatgggagcaagaatacctgttttgtctctctccacacatcaagtttctcacctttaatatggggatgataataatagtgcttgatttatagagttgttaaaattagatatttcacaataaagcacatggcatagtctgtggtatataatcatcatttagaaaatacagcttttttttttttttaactaacacatagcaatatgatcacctttcttgatcatgctaatactaatgtgttcactttttttgttgtgtcgttttgttttgttttgagacagtctcctccctctgtcacccaggctagagtacagtggtgcagtctcaactcgctgcaacctctgcctcctgggttcaagtgattcttgtgcctccacctcctgagtaactggaactgcaggcatgcaccaccactcctgcttaatcttttttgtgtatttagtagagacagggttttgccatattggccaggctggtctcaaactcctggcttaagtgatctgcctgcctcagcctcccaaagtgctgggattataggcatgagccaccacacctggccctgtttctatttcttacaaattttaagcctcttgaaaatagaatgtatgatgaccatttttcccttcatacctagttcagtaatcagtaggtattaaatatatatacttttaactgtaaatgaataaaactgtatttttattctgagaatcaagtgagaaaggtgctttgacctaaatggtcactaaaatatttagtgtagtgacttgctttttaagtggatctaagaagtacagaaaataggattattctagtcaaaaagaatgtgaacctaattttttaatggttgggagaagtttttgtagaaatcatttcatgctttttaggtagaaaaggggctagacatggatcaaggaatcatataagaatagaaagagcttctgaaaagggacacacatatataagagatggtgaaaggaatttggatttagcatcccagtacctttagttggtgatatagcagtttagtagagggtaactgtaacacagtaacaaagacttttcagaaactcaatgtaaaagaaagaactgtagcagtggctcacgcctgtaatcccaacacttggggcgtctaaggcgggcagatcacctgaagtcaggagttgaagaccagcctggcaaacgtggtgaaatgccatctctactaaaaatacaaaaattagccaggtgtagtggtgcatgcctgtaatcccagctactcgggaggctgaggcaggtgaatcacttgaacccgggagacggaggttgcagtgagctaagtaaatgccattgcactccagccttagcgacagagcaaggctctgtctcataaataaataaatgaataaatgaaagaattttatattttgcactggtagaaattaaattagagatcagtcacatttgatttacctggagtttgggagatagaatgttttcagagttattttaagcatggtaattaaagagtttctttgggattttggttggattggaggagataacttaatgggatgaggcagaaaacagttaagagccattgtagattacagattaatggctttactgtagagccttaaattaatctgtggtttcaaactctcatccaagctttgtgtttcacagacttgttgagcccattaaagaaatggaagtctcgctatctgatggagcagaatgtcaccaagttacttcggcctctgtctccagtcacaccaccccctcccaattcaggctcaaagagtccccagctggccacacctggctcatctcacccaggagaagaggagtgtcgaaatggatacagcctcatgttttcaccagtcacatctcttactactgctagtcgctgcaacactcctctacagtttgaggtgatttgggtttggttgctgggagtgctggatatgaaaatcatcatttgtaccttctcatttcaaatataataccattccaaatgtttctttactatctttcttccccatctcagtaagagaatgggaaacctcagg

SEQ ID NO: 360 - DNA, 1549 bp, Homo sapiens
  source 1..1549: mol_type = genomic DNA
aaaaattctccccatctcattcctctatgtcccatttggaggcggtaagcccatcagattccagaggcacttcttcatctcactgcagacctcaagagaatatcagcagtaggtggtaagtttatatttgatgttttatagttaaattgggggtgggggggagtatatatctaagatcattcccagttttacctaaaatctatgggaacacttgatgggaacatctgagacagccagccaacagtaccatctgtcctgttcagctgatttaataatgtcagctgcaaccccccagctttgcagaattaagaattaccaacatgcctgtggagcagtgctttggatgacatgtagttatggatgcagatgagctctttcatttggtgggcactaacactgcctttcctatttctcatttcacatgaaaggtgagtcaagaatccagccaagttccacatgaattaacaacagatgtctctcttccacacagctagcatatacagagcaaaaagacattctgaaaggatttgtctggtttaggggagaccacaaatttaaaaatgaataatactggtggcaaatactgaggatcaaatgtgtgaaatagagaatgaagcacaggagttcagggatcttgaactgaaaaaaataagtctgggaaagaacagtcctggctcaaatgtttcatgttcattaatctatgaaacctttattaaaccagtactgtgtatcaggcacatgatttcctaaaggagaaattttaacattttaaatgggggttaagggaagttaacatctttaacccactttttccttgatttctttttctttaaaagtggttgttgttgatgtttctcttttgtgcctgacatagttggaggcagaggaaatacgttgttttaaattggttctgaagaaagtaatgtttaagaggatgttttaagaaaatacactgtgcactggttagggcttcatttgttttggttaagtcctgtggcttgaacttgcaccctgttgcctttacaggatggttcccacatcagtagaacgactccgagaaggagggagcatccccaaggtcctccgaagcagcgtgagggtggcccaaaagggagagccctctcccacatgggagagtaacatcacagagaaagactcaggtgagcccatggccttctgctgccaccacattcagggacacatgagccgagtcctgtacagttcatgcctagtgctgagttgaggtgagtcagtttctgatgcagttgggctccaccgcatgctaggttccagcccacttatgctcatttgggctaccacatttgtaagatctagcattgcttgctctctgtctgctcttttttccccaaggaatacctttctgtaactctcatctctccaaagtcctggaaatctacctcgatgaaggatgaagagaaagaagacgggaatcacatcaggcatttagaacatagcccataattaaccactcattttgcccttctggcatgctgcactcacccaatttgtcacaaagagagcagtacgg

SEQ ID NO: 361 - DNA, 4103 bp, Homo sapiens
  source 1..4103: mol_type = genomic DNA
ggacagagttcaacttgatgtatgcctactcccctttgaatgctatgcctcgagcagatggactgtatcgaggatctcctctagtgggggataggaagcctttacatttggatgggggatattgttcccctgcagaaggattttccagcagatatgaacatggcttaatgaaagacctctctcgtggatccttgtcacctggtggtgaaagggcctgtgaaggagtcccatctgccccccagaacccaccacagaggaaaaaagtaagtgtttcatgttatatcggcgaacttttcaagaatgttaaccaagtagtttagtagatattcataagtttctgctatgtgttccgcactactctcagacaagtgagacatagtctctgccaaatccagtgaaagacaggctgttttagtacaacttggtgaatgttgtaaatattcagcaaatgtaaatgcctgtatgtgccatatacttgctaggcaattgagaggttagaacagtgaaaaagaaattttacctattatttagtgtgtcccaagttcgaggcactgtattaagctctttaaatgtgttttatcctcacagtaagcctataagataggcaattttctattttgcacatgaggaaactaaggcaagttgagtaactttcccgtggtcacacagctagtaaatggaaggaccaggatactacccagtttgagagagaaggctggagtgagaggcagcaggttactgatttaactgaatctcaaacaataagtaggagtcagccaaccaacaattgagggtgaggtatgttacagtagagggagtagaacaggtaattaggtggcactccattggccaggcagcaggcatgcagtatggtgcaaacagttggatgttgttgtatcaggtggaaggccgggggagccaggaggaaagtgcagagagtgctgggctgggccaggccatagagagcttgctaatgggttgggactccacttccaagtaatgcctgatcaagaagtcacaaagccaaaaatatgcttttgtataagtggttctcaactaggggtgtttgagaatgagtaggagtgttttgaattgtcccagtgacttgcatttattgagcagggccagggatgctgaatgtcctgtataggggacagtcccatgtaatggccaaacatctgtagtatcctcattgaaatgaaacctagtggtttttttatattttcattataatgatattaccagaatttattaacttctttccaaaattatttctagaaaatgcatatgcaaaactgtctatatttttgttccatttggacagaaaaatgagaaccctaaggggatagaaggaggaggaaacattggcagataatttggattaagataataattgatttcgaagattgttgcgtgaacagcattgactaccagaaacaaacatgaaaacaatctttggatttctggttttataatatttactatgtgcaaaagtcatagaaattatgatattttatttcagaaacacttctgaaatttattgggcacatttaagcataaatttaagcatatgccaaattctgtgctggatgttaaagataaaaagccagataaacttggcctttgccttcctagaacttatagtttagtcagggagcaatcaaggcatggtaataggttctacggcctgtgtaagcaatgtgccagaacaacaaagagaaggtgtactaggcagggcacggattatggtgggcagggtgggatgggaggtctgctgtcaggaaagaatgagcaagcattagggagatgaaggggaagttagggagaagttaccaagttgttttctagagctagcttgctaaaattataaactggaaataataatttcctctctttttacattaattacatctatgtgtaagacagaaacagtaataaattcctatttatatcttgaaaatttgaacatatttaagtatcctggagcattgggtttttcttctgttttgttttgtttttccttctctctctccctctctctctccacctacctctccccacctccctctcctccatctccttctcctctccctgcttctttctctcaaacagctaactctaggggttcccaaggagtacagaacagccatcagtcacctgggaggctttttaaactatacaagcttccaattctcccttctctaggtacttccattgttgcaaataactgtgatagcatgcttctgttactgtgtaatggtaacctcacaagtttttctgaaggcagaaaaaaagatggtggtctaattggcaaacattctttagagacttgcctcctagtttattatcttcctcttaccaatttccagctgccttaaatatgtagctgtgctcagatctctttcatactccccaaaaaaagttatcagggttggtgtctgctttgtttgcgtggcttggctagtggtttactaaggtaccatctttccttctttccctgttgctggtgatccactaatgatatccagatagagtaccgttttttgtttgtttgttttttcctttctaggtatccctgctggagtaccgaaaacggaaacaagaagctaaggaaaattctgctggtgggggaggtgactctgcacagagcaaaagcaagtctgcaggagctgggcaaggcagcagtaactccgtttccgacactggtgcccatggtgtgcagggatcctcagcccgaactccatcttcccctcacaaaaaattctccccatctcattcctctatgtcccatttggaggcggtaagcccatcagattccagaggcacttcttcatctcactgcagacctcaagagaatatcagcagtaggtggtaagtttatatttgatgttttatagttaaattgggggtgggggggagtatatatctaagatcattcccagttttacctaaaatctatgggaacacttgatgggaacatctgagacagccagccaacagtaccatctgtcctgttcagctgatttaataatgtcagctgcaaccccccagctttgcagaattaagaattaccaacatgcctgtggagcagtgctttggatgacatgtagttatggatgcagatgagctctttcatttggtgggcactaacactgcctttcctatttctcatttcacatgaaaggtgagtcaagaatccagccaagttccacatgaattaacaacagatgtctctcttccacacagctagcatatacagagcaaaaagacattctgaaaggatttgtctggtttaggggagaccacaaatttaaaaatgaataatactggtggcaaatactgaggatcaaatgtgtgaaatagagaatgaagcacaggagttcagggatcttgaactgaaaaaaataagtctgggaaagaacagtcctggctcaaatgtttcatgttcattaatctatgaaacctttattaaaccagtactgtgtatcaggcacatgatttcctaaaggagaaattttaacattttaaatgggggttaagggaagttaacatctttaacccactttttccttgatttctttttctttaaaagtggttgttgttgatgtttctcttttgtgcctgacatagttggaggcagaggaaatacgttgttttaaattggttctgaagaaagtaatgtttaagaggatgttttaagaaaatacactgtgcactggttagggcttcatttgttttggttaagtcctgtggcttgaacttgcaccctgttgcctttacaggatggttcccacatcagtagaacgactccgagaaggagggagcatccccaaggtcctccgaagcagcgtgagggtggcccaaaagggagagccctctcccacatgggagagtaacatcacagagaaagactcaggtgagcccatggccttctgctgccaccacattcagggacacatgagccgagtcctgtacagttcatgcctagtgctgagttgaggtgagtcagtttctgatgcagttgggctccaccgcatgctaggttccagcccacttatgctcatttgggctaccacatttgtaagatctagcattgcttgctc

SEQ ID NO: 362 - DNA, 17268 bp, Homo sapiens
  source 1..17268: mol_type = genomic DNA
atattgctgcagaaaaactagtccccaagccacctccagcaaagccttctaggccccggccgaagagtcgaatttctcggtacaggaccagttcagcccaaagactaaagcgtcagaagcaggccaatgcacagcaggcagaattgtcacaagctgccttggaagagggaggaagtaacagtttagtaactcctactgaagctggaagtctagacagttcaggagaaaacaggccattaacagggtctgacccaactgtggtgtcaattactggatcccatgtcaaccgtgctgcatctaaataccccaaaaccaaaaaggtaagtcacaaatgcatcctttataagtccagtctggcaagggctgtcttagtgaaatgagaggacctataatccctagaagaaactaatctcaatattactagattgaaagttctaaaatgctttgacacaaaaggctggagtcatcctgctacctgtttccttatttttagtcagcttaaatcactgatagctgaaattattcctctcttagtgggcgtggagagggtgaaggaagatatccttgtgttctagttgctcaattcattcttactgcagctgctgcatctcctcctgtcctagtttctagatgacgtttgtctttatgaactacactgctacctcttgatttataaactaatgatctcttttttaccttagtatctagttacagaatggttgaatgacaaagcagagaagcaagagtgccctgttgagtgccctttacgtatcacaacggatccaactgtactggcaacgaccctaaacatgttaccaggtcttatccattccccgttaatttgcaccacccccaaacactacattcgctttggctcaccctttatccctgagagacgtcgaaggccccttctgcctgatggcacattcagctcctgtaagaaggtatgtctgtgtttttgtgtgtgtgttgtgtttatgtgtgtgtgctttatttttttaagcctaagattcctatcatcatgacataaataaaatgttctctagatagccactctgcccatgtgagtttataatgagttagttgttcagccataaatactgattcatcaagagtctgtgagactgtggtggaatgaatgtactgcatttttagtgctcagatttgtgactggtcactgatgtctcttctgagaacccttgaggttcctgagtgagagcacacagcagtggatgactgggtagagacggatatgttttgtgtgtgctcttgtgatatgggttaacatgtccatttatgattattgtgtgagattaggccctgggtcctctagaacactgttgcataaatgaaaaaaattaaattgttttgaatcaattcaaccgttattatccactatcatcacttgaaggaaattagaggaaaaatcctattgtaattggcataattcctgttccttgatcaaatgacaagtcggactgtttattccaagagaatacagaatctaccctaaaagactctctttccctctctgtttctgcctctttctcctctttccagttacttactgtttttggatctagtggcagtagcgtttggtggtgtttttggaatgctctttcttaattcccagaagccctgcatattttccaaaggtgtctcttaggaatagatcactccctcagatctatgatgtcgttttccatgtttctagaagtataggacaccctttcatttggtcttcctttgaggtagagtctgttccctggaacacccttttctcttatcctcagatctggattcaggctgccttcctcagtgtctgccattgccctcctccactggcatcacgtacatgaggatgctgcatgtagattatttgatgtgatgaagtctccaactccaggcaggtcttccctgactcctccaaacttaaaagcttttctctttccccaaagaacagaagttatttctccgggggaggggggcatgaaagatgagccaaagtggtgtgggatatggaggggaggagggcaataggaatctgcaaaaaggaaggacactactgctgaatgagcagcacattgcagaaagtcttttcctaattgcacatcttacctaaacattggaatcactcattggtttgttcggggaaacgctcgtagaattcctaaagagaaatttgaccatttctaaggatgttaactgttgaagcatcttatcaagccaggtcgtacaatctcctattttggtcctttaaggagtgtaggcaattatttattacagataagtaatgaagtctgagctgcaaataatatgaactaggctcttgaattgaaattccttcttgataattctaatgctgggttgcagtctttctgtttccatcttttccaactagcagagacttaacgaaaaccaaaaacgtgtctaggactgtaacttcagatctggtagaaaatgcatttctttaagcttttttaacttggttctgcttttatacttgtatctatagcacatccttaaatttctacgggcaacagatagaaattccatttaacacaagtccctgttatattctccaagtgtatctgactatccttaatctcatttatacaggctctactcaagcacttttatctatgtgtcatggttagtctttaggaagagtttaggctgcatacacaggattatcataacaagactatttaaataggatctttaaaaactgtttaagtcattgctttattgtgtgctgttcacatatcaagattctattttttaaaatacagctttttatgaggcaaaataaaatgaaatggaatgttttagctagaatagaatttggctttatagcagtgaagaagagttcttcttctaatattggtcttcttctaatatctcctaatattggttagaaaggacttacctaatgcagaacctaagaacattttcattattcaacaaaattgtaataaaattctgaaaatccctcagagtataagttaatcagatagataagaaaaccctccatgggattatttagaacaatgtatatttctaataggctcactgtttcatatctcactaaagaggtaagggcctggccttgtaagttaaaaacttaccagtataggacaaattaaagttgtatctgtatagttgtactcagattcttatgctatttatttttatttttatcattattattctgcaacttctgaaaagaagaggagttcaggtatttgacagaacattttatgatatccctagagtttctaaattgaatcatagtttttaagaagcattttgcattttttagttcctcagttggtattttaaaaacatttataagtggccaacaaggctctcagtagtgtttcaccttgttctctctaaactcctcttctaaacacaatgtgtatagggcatttggtctccagacttcttagaaaaaccagtctgactgataatgaaacagtgtgctttgcattgataattaatatttcattttatacactggagcattatctgtaaatctccaaacatagcattgaaatttagttgaaccgggactcggtgaaaatctgctcagtgttcagtactgtactataagctttcttcacatacattatctcacttaccatgcatgaaattgggatcattgtcctaaatttatatatccagaagctttgtctcagaaatgtttggtaacttgtccaaagtgaagcagctaataagtgacacagccagatttcttctggtgggggatagtaggggttcacagggtctcactgttgtccaggctggagtgcagtggcatcatcacaggctcactgcagccttgacctcctgggctcaaatggtcctcctacctcaacctctcgtgtagctgggaccacaggcacaccaccacgcctggctaatattcatattttttgtagcgacagggttttgctgtgtttcctaggctgatctcaaactcctgagtgcaaggagtctgcccaccttggcctcacattctgctgggattacagatacgagctactgagcccagcctcacagccaagtgtcaagccagggcttctggactccaaaacctgtattgcttccttgctctttcgccataatagcgagacctttaaaatatttatccatctttgagcctcccagaaaactcctttgcaatatattttaatagaggttcagagaagggagaaatgttcttttgattttaacaacttgctgagtaggtgcatctaaaattaacttattatccatgaggttaattgtatcttgttagatacaaacaaatgtccatgttccttttttatatgagtcctgaaatattgtaaaattatacaacagaacctggaggagtaggtttgattgtatttgctgtgtttcacctcatagctaaccatggtagcatctttcttctagaatactcctgttctgattttatgttccctttttgtagtcatcagatccagaatgtaaattattttacaagtacatctactagaccctggaaatattaaaaaattactcagataggaaagcttagtgaccccaaatgagtgttttctgctttgaaaagaaaaacttaaaggtggccataacaaaagatttttcactcctgagcctaatttttccatttataaaatgagtgctttggacaagatgacttctaagttctcttctaagctttaaggctatatgtatggttctgacaattcatctttacatcattattctgtatctaagatagttcattcttcggattttttattttgtttttgtgtttgcttttcagagacctggttgtatcctaaaatgtttacgtgattcaaattaccattgagagctcttttttatatccttgttcactcttccttccaagtgtttacaggtttacagtttcagttttgctttcatttggccagccacaatgacatttgtatgatgtaagatttttttttttttttttttttttttggtaaaatttttgtggattgtttcctaggtttctaagagggaaaatctatgagaattgctctctggtgaagagagtatttacttacctgtaatacatgttctctaaaggtataaattataataattcacctttgctcttcctattgggggagggtcttactcagaaattgatgtttatcaaaattcgatctgtcttatgtcagggcaggagagccacagagtggtgagcaacctacaactgtatatcttaagagaacacaattacaggtaagaaattttctgtcttccacaggatacataatcttattatcctaatctttgcaggtttactatctggcctaaatttatttcttgtcagtttattattctaatctttactaccaaaaacttgtgactgataggtcttctttttgactttttcccttttttttgatttctactgaagctcatttcgtgatttgcattactcatgcataatttaaccaaactacttgttggaggggggagtcccataggttatttcatttgaaataaaccttttggaaacgcttttggtacctgtagtgaagagctattaatcctcatccaaaatcttccaatgaatcttttttattacctcttcacacgtctctagcacggggcagacaacttttaagagatctttatcttccttctaggcgcttattttatatattagttttattctatacgatcacagtctctcctaaataaatgttaagatttcttcctcagtcttgccattttacaccatcccaaatggtatgaaaagttgaatagcagtcattttttattggtttttgtcttttgatgggatctcattatatgtaatccagatttcctcaagtttttcagttaaaaggaattgataggacaatgttccaatatgctgagacacaagacaataaaatgcttgactgtgtaactgaattagtgtgttgaattgtatcactcaccagttgatgtacatttaaaacaggtgcactaaatagttttagataattattgataattctctggttcttttcaattatagcgctggataaaacaagccttagaagaagggatgactcaaacatcatctgtaccccaagagactagaactcagcacctataccaaagcaatgagaatagtagctcttctagtatctgcaaagacaatgcaggtacgtatctaaaacctttctgattatatgaccaatgattgtttcaggtctgcataaaaaatttaagtatgagtatttctgatacaaaaagaaatggcgtgttttctaaatagttactttacatctgtctttacagaggaagagagagatctcaagtcagggatcagttttcccaggacgacaaagaaggactagacagtgtacagataacagcagaaatggttataaaaaaggttagatacatttaaagtagtaagtttaggaaatttatattcatatttataagatggggcaagggcaagaaagtggtggaacactaatattcaggaaagaattaaaattctgagtgattaagttgggtgggacatggttgagggagcaggggatgaatgaaataagtgaaaaattattatcaattgattgttttcaaaggggcttgtataattagcatacaatttttaaaagaacagccgggcgctgtggctcgcacctgtaatcccagcactttgggaagccaaggtgggtggatcacctgaggtcaggagttcgagaccaacgtggccaacatggtgaaaccctgtctctaccaaaaatgcaaaaattagctgggtgtggtggcaggtgcctgtaatccctccctaaacaggaggctgaggcagtggagaatcacttgaacccgggaggtggaggttacagtgagccaagatcacgccactgcactccagcctgggcgacaagaatgaaactccgtctcaaaaaaaaaaaaaaaaaaaaaaaaaaaacaaattttttaagacagctttaaatctaaagtctttgtgcatttttaaactagatgtcaatgaaaaatcatctgttccattggttttgacagtgacttgcaaaggatgtaattgaaagcacttgtgatatcttaatgtattttgtgacaatctttttaccagtttctcctgcaaatatcagcttaattgaaaagttctttgtgattttcataacttttctctaaatcagttttttaaatattagacaatcaaaataccaaagtaaattagatgctaaagcaacctttcaggttgcaacaaacagaatatttcacattttcataaaaaacccacttcattgttcctgtttaccaacttgctgaataaatgtaatgaacttgaatttaattagataaatttttagtagcagatattgcaactaaaatcagaacttttcttaaagttcttacttcatttggattttacttctttttagattttatttcagaaaacgtgaattgcctttttttctttttttcttttttttttttttttttttttgaaatggagaatcaagcgattctccctgcctcagcctcccgagtaactgggattacaggcgcccgccacctcacccggcaaatttttatattttgagtagagacggggtttcaccatgttggccaggctagtctcgaactcctgacctcaggagatccgcccacctcggcttcccaaagtgctgggattacaggcatgagccaccatgcctggctgtgaattgccattttttaaattatggatttagtttattcttttgtctctagattagattatacctcataagttaccacctatatacctcaggataataaaattccagttatctgaaagataaattatactgtttatttaaaatattttcttctagtattcaccaaaaattagggatatttagtcaaatatgaatagtataaagaaatcttggtaccagatttccatttgtattatttcttttttaacagcttttaaggtgttagtaagaatataacttagctgaaatagactatcatgtttgtgtatctatctggtgtgtgtgttaatgcatgtgtatagttaaggttgggaacaggagattgcatagcagttcacatcctgactagcaaaggattataggaaaagtgtctttgttatcacatgccctggttggaaggaaattaggattcctagtcaccagccttttttgttattgttgagcttctgccctagtctaacagtgagaaacactcacaggacacaccttgcccttaaaaagcaatgtaggaaaatatttgattttaaaaatcaagcagcagtcaaatgcgcaagttatattgctacaaaattagcataaattctgaggaattacttttatttgttggctctcttttgtttttttcaagaataccaaagagacattaagaaaggggaaaggatttctataatagaaaaaatcaaacagacctttacttgaaaaccagctgtcccctttactaactatatgatgttactagaagtctctgaggctaggcgttggtggctcacacctgtaatcccagcactttgggaggccaaggtgggcggatcatctgaggtcaggagttcaagaccagcctggccaacatggtgaaaccctgtctctactaaaaatacaaaaattagctgggcctggtcacgtacctgtaatcccagctatttgggaggctgaggcaggagaattgcttgaacctggaggtggaggttgcagtgagacgagattgcgccactccactccagcctgggtgacggagggagattctgtctttaaaacttaaaaaaaaaaaaaaaaacaagtctctgagcctcatttgtaaaatgggaatagcaatacctgctttatagagctaacattagaatgaataatgtatataaagttctcaatatagtatcaggcccataagagtaattattatacggtcattattctacacagaatactctttcttgtagagtatttgtggattaataaatacattaaagattctggctgggtgtgatggctcacgcctgtaatcccagcactttgggaggctgaggcgggcagatcacgaggtgaaaagattgagaccatcctggccaacatggtgaaatcccatctctactaaaaatacaaaaaaaattagctgggcatggtggcatgcacctgtagtcccagctactcaggaggctgaggcaggaggattgcttgaacctgggaggcagaagttgcagtgagccaaggtcacgccactgcactccagcctggcaatagagtgagactccgtctcaaaaagaaagaaagaaagaaagagagggagggaagaaagaaaagagaaaagaaaagaagaaagaaatacactaaatattttaagttcctaaaagctgaaactttatagaaataaaagttattatcaaagtagggcaggggcatgatgttcattatttgtaaatgatgtgggtctattcttagaagagcctaagtaatcagctgaaaaacttagaattaataataagagtttaggccaggcgtggtggctcacgcctgtaatcccagcactttgggaggccgagatgggtggatcacaaggtcaggagatcgagaccatccttgctaacacagtgaaaccccatctctactaaaaatacaaaaaattagctgtgcgtggtggtgggcacttgtagtcccgctactcggggggctgaggcaggaaaatagcatgaacccaggaggcggaggttgcagtgagctgagatcgcgccactgcactcctgcctgggcaatagagtgagactctgtctcaaaaaatatatatatatactaataataataataagagtttattaatatcactggatagaaggataaatatataaaaagtgtaaatatattttaaaaaatcatttatataccaagaaagtaaatgaataccaattttttttgttcccaaacttaacaaaactaagaaactgcctaggaataaccttagttgggtatatggagtaaactgttactgagaaatatttttaaagtctgaggaaatggaaatttctttttctttttttttttttcatgaatcatacgtgagcctttgataaatttcatgttcattatggaaagaatatatatatgtgtatatatatatttctttctctttctctctgtctttatatagttcccatgaaactgccttgtttttggaatttgattaaatgattctgaagtctacctttaaaaaaataagaaaaaaattgaaaaaataataatgaagtactttctcttgaggtgtaagacgagcttctagtatgaagctaatagttaaatttagtataatattgatgcaagaatggatgtatatatggaacaaaatagtcagaataggcctaaatataaatgtaaaagttggtaaattgtcatggaatttttagttaggagattgaaaaagaattagaatctagctggacacggtggcacgtgcctgtaactctcaactacttgggaggctgaggtaggaggatcactcaagcccaggagtcaagttcaacctgcgcaacacagcaagaccttgtcttcaaaagaactactaggtcctttgccaaagaaaattctaggcacattcaaatatatatatttttttaattcaaacttgggcctggcatggtgactctcacctgcaatttccagctctttgggatgccaaggcagaaggatcacttgaggccaggaatttgagaccagcctgggcagcagagagagacccacatctctacaaaaaataaaaattagccaggcatgatggtgggttgcctgtagccttaaggaggctgaagtaggaggatgacttgagcccaagaatttgaggctgcagtgagctgtgataatgccactgcgttccagcctgaatgacagcaagacatctgtctctaaaaataataaaataaataattcaaactgtattaaccatgtttttgtgtctatactgcctctgtattaatagaggattagtacattggggaaaggatttgcagtaaaactgccggggagtaatatccctgctagcaatctgataaaatttatcatgtgcattaaaaatattcataatccttaacctagtagtcgttcatttgttctgcttggtatctttcctacagaaatagacaaagaaaccaaaatttatatataaggttggtgcaaaagtaattgcgtttttggaccattaattttaaatcactgtaactagactcagacacatctttattaatcaaaataggaaccactgcaatcaacacatttttgccactgagaaataagtttgtttattcctgtagcctaaaaatctatgcttcaggattcgacaaactcttggaaaatattttctgcatcctgctggttgtggaagcaccttccctgtaaaaagttgtcagatgcttgaagtggtacctggttggcgagaggtcaggtgaacatggcgggtgagacgaaactctgtagtcaaatttgttcagcagcttcagaagttgaatgaattgtttattagaataattaattcttagttattaacaattgcaaaaactataggttaaaaataatctgaattccaaccccaggaatggtagaatttgtaattttatctgcttgtgcacatacttgtaatggagtatcatatactatttattgaaaatcttatttttgattcattttatcaaattaactccctctacccccaaaaacagcgtagtaccacttttgaattagatttgtgatcttacctagcaccttgaatttgtaagaatattaaaagaatagccaggtgtggtggctcacgcctgtaatcccagcactttgggaggccgaggcaggcggatcacgaggtcaggagatccagaccatcctggctaacacggcgaaaccccgtctctactaaaaatacaacaacaacaacaaaaaaaaaaaccgggcatagtggcaggcgcctgtaatcccagctactcgccactgcactccagcctgggcgacagcgagactccatcaaaaaaaaaaaaaaaaaagaatattaaaagaagaatatacgatgactaaggttccttctaggaatgtaaggatgagttaatatttgaaaatttaataatcgtcatttgttagcaggtcaaatgggggaggagaagtcataacacagtgacttttatcaatttaatgataaaataacatactatgatcttttaatatctagctgaaaaattgccagttgtcatgcatcatgaaaactagttaaacatcaaaataggctatcaaattatcccactattaccattattatttaatatagtctaagtaattgttagccaaagtaattacaccaaccccctcccccccacaaaaaaaatcaacataagagatataagtactggtaaagagggttaatgtgttatcatgtacaaatactattatctacctagagagttaattgaaaaactggtagagattaatagggtaactggataaaaaataagtatgtaaactttttaaatgttaataacatttagataacaaagggagagatacgttttattcatagtagtaaaaaaaaaaaactaaagaactctggagagtaaacttaattagacatgtggtatatatagatgaagagggacataatatgtgaataacaaagattatgccatgttcctgggtaagaatgcttctcaaattactcctgaatttcatctaacaccaatcaaaatcctaacttttttttttttttttaatagtatgagcatggtcattgaatgacttctatagttcattgctagaatagctaaaatattttggagaactagaacagaataactggaatttccctaacaattttaataaaaagtatgctggtgttgattcagtattggacaataagtggaaagaataacattcggaaataaacattcagaagataagcccagtatatgtaagaatctaataagataaatatatttcaaattaatagggaaattatagttattctacatttacagaagattttggaagaaggtgctggctatttgttatggggaaaggatggattaattgctaccccatatttaagtatgttcttttttccttttttgtaatggcagtttgtcagtgtgaaataaaatgttcttttttaattaaaatctaaattaaaaattaaacatggagacaaaaggaaaataggctggcatttttacagtgtcagggtgggttagcaaagacatgatatcagaagcagaaaataaagtgatccgtttgactaaatagaaacaaaacatatagcagagacttgtaaataaaattgaaggcaatcagtaaactgggaaaatacatttgtaattttattgacaaggggtcaacattcttactatttaaagagcccttacagatgaagaaaaagaccccaacacctcagtagaatgcaggctgaagaacatgagccagcagttctcacaggactaaatataaactacacatatatagatattcttttgatttaataatcctacatgtagccatttgttctaatagcaaaaaatgaaaaaaaagttggttaaattttgataatactaatgttgtgcagtcattaaacctgaactgtagatttctattcattgtcataaaatgttgaccatgtatttctgagtgaaaatagttactgagtagtttaggtaaggcaagagtcagtgaagcaatgtctcgataaaaatttaccaggatattagcatgcgtttatttgtggatatgattttcaggttgtgtatgtgctgtataaccttggtaattttttgagtaaaggtgaaaaataataataataaaagatggatagatttgaccacataaaatttggaaactatatatgcaggaaaaagagaaaaagtaggcaaatgacttggctttctttggcctgtaaacttcttaagggcagacatcaggtctcttgttgaatacagtatcataataagtactcagtaaatatatgttgaatgaatgccttgtacattgatttgcacgtggcagatttcacctgtatcttataactcctttctacaactaacttcatcacttaacataattgactttgatagttatagtgttggacctagcagtacagagatctgtaagattccattgtttaagacccttgaaatattaaatatataaaagttattccgaatataagccatgaattacatgtttgtttctgttttatacctaggcactttttaaaaggaggaaagaaaatttagtatctggaacaaaaggaagatgtgaatatacttccaatctaggaatattaaaaatcctgagatatcagaaaggaaaaatatgcatcttcaataattttttgcatttattcttccctcttcatctaaacatctcctaccctagtttagtgcctcataattctttgctaactactgtgttaactccagatggtttcccagttactagtctcatactgaccattgcttccagataatcttcctggcccaaaaattttccttgaaggcctggaataaatgtcactccttccatccaccaagccttggggatatactttaacctattgattaagaatatagatagatggagccaggcgcggtggctcacgcctgtaatcccagcactttgggaggccgaggcgggtggatcacgaggtcaagagatcaagaccatcctggccaacatggtgaaaccccgtctctactaaaaatacaaaaaattagccgggtgtggtagcgagcacctgtagtcccagctactcgggaggctgaggcaggagaatggtgtgaacctgggaggcggaccttgcagtgagccgagatcgtgccgctgcactccagcctaggtgacagagcaagagtccgtctcaaaaaaaaaaaaaaagaaaaaaagaatatagatagatggggccaggcgtggtggctcatggctgtaatcccaacactttgggaggctcaggtgggtggatcacttgaggtcaggaattcaaggccaacatggtgaaaccctgtctctactaaaaatacaaaaattaagaatgtagatatatgggagcaagaatacctgttttgtctctctccacacatcaagtttctcacctttaatatggggatgataataatagtgcttgatttatagagttgttaaaattagatatttcacaataaagcacatggcatagtctgtggtatataatcatcatttagaaaatacagcttttttttttttttaactaacacatagcaatatgatcacctttcttgatcatgctaatactaatgtgttcactttttttgttgtgtcgttttgttttgttttgagacagtctcctccctctgtcacccaggctagagtacagtggtgcagtctcaactcgctgcaacctctgcctcctgggttcaagtgattcttgtgcctccacctcctgagtaactggaactgcaggcatgcaccaccactcctgcttaatcttttttgtgtatttagtagagacagggttttgccatattggccaggctggtctcaaactcctggcttaagtgatctgcctgcctcagcctcccaaagtgctgggattataggcatgagccaccacacctggccctgtttctatttcttacaaattttaagcctcttgaaaatagaatgtatgatgaccatttttcccttcatacctagttcagtaatcagtaggtattaaatatatatacttttaactgtaaatgaataaaactgtatttttattctgagaatcaagtgagaaaggtgctttgacctaaatggtcactaaaatatttagtgtagtgacttgctttttaagtggatctaagaagtacagaaaataggattattctagtcaaaaagaatgtgaacctaattttttaatggttgggagaagtttttgtagaaatcatttcatgctttttaggtagaaaaggggctagacatggatcaaggaatcatataagaatagaaagagcttctgaaaagggacacacatatataagagatggtgaaaggaatttggatttagcatcccagtacctttagttggtgatatagcagtttagtagagggtaactgtaacacagtaacaaagacttttcagaaactcaatgtaaaagaaagaactgtagcagtggctcacgcctgtaatcccaacacttggggcgtctaaggcgggcagatcacctgaagtcaggagttgaagaccagcctggcaaacgtggtgaaatgccatctctactaaaaatacaaaaattagccaggtgtagtggtgcatgcctgtaatcccagctactcgggaggctgaggcaggtgaatcacttgaacccgggagacggaggttgcagtgagctaagtaaatgccattgcactccagccttagcgacagagcaaggctctgtctcataaataaataaatgaataaatgaaagaattttatattttgcactggtagaaattaaattagagatcagtcacatttgatttacctggagtttgggagatagaatgttttcagagttattttaagcatggtaattaaagagtttctttgggattttggttggattggaggagataacttaatgggatgaggcagaaaacagttaagagccattgtagattacagattaatggctttactgtagagccttaaattaatctgtggtttcaaactctcatccaagctttgtgtttcacagacttgttgagcccattaaagaaatggaagtctcgctatctgatggagcagaatgtcaccaagttacttcggcctctgtctccagtcacaccaccccctcccaattcaggctcaaagagtccccagctggccacacctggctcatctcacccaggagaagaggagtgtcgaaatggatacagcctcatgttttcaccagtcacatctcttactactgctagtcgctgcaacactcctctacagtttgaggtgatttgggtttggttgctgggagtgctggatatgaaaatcatcatttgtaccttctcatttcaaatataataccattccaaatgtttctttactatctttcttccccatctcagtaagagaatgggaaacctcagggtcattgtggcctgttacctggtagcctctcatcttggcagcccctatgcttcccaaaataggcatactgctaccacaaatcccattcatgtatcttttgcatgcagtccatcaatctccataagtttaggtagtaagcatgct

SEQ ID NO: 363 - DNA, 7023 bp, Homo sapiens
  source 1..7023: mol_type = genomic DNA
agatccaattaagaagaatagttctgagtctaaaccagcccagagtggcttctctaggggaaactccccgctcagctggtacgtttgtgtttgtcattagggacaccttgtatctcaggtgcctgccttcagacatctgcctgtactggcttcatgttacacacaaatccacatttaataacactcctactgttatttataggcttagttatgttaataagattgtttcaccgagttctttctcttatcctagtggctagtggttgtggaaagaggaggggttagaatgggaaatgaagtgttagtttaagggaagattaggtgttatgctatcatgcattgcttttcgcctttgtgcagccctgaatctgtggaggctagtccagcagttaatgagaagagcgtgtattccactcataattatgggaccactcagaggcatgggtgtcgaggactgccttatgctgtgagtatgcatttgtttctctccagaacagtgatcttcctggagtgtaatccattcttatacattgtgactttcttgaaatgtttatatgcagcatgacgaagttgccccttttgcacttccctgactccagcggacgtctagccctgcatcattgttcttgtttttatgtcccagttgaccttggcattttgttttatcactttcctggttgaagccaaaaaacaaagggtactactttcttctttctttccatatgtaccatactttaggggagagaggggccagtgtttggacactgttgatttaaaaaatcttattttcaggatcataattacggagcccctcctcctccgacacctcctgcttctccccctgtccagacgatcatccctcgttctgacctgaatggcctgccgtcgcctgtagaggaacgctgtggagacagcccgaactctgaaggagaaactgtacctacctggtgtccttgtggtctttctcaggatggcttccttctcaactgtgacaagtgcaggtaagatcctgttccatctaaatttaagtctgggttgctgggattagggtttcttacaagtagggaaaagctcaaagtattctttcttgtgtttgttaatgtagatgattccttagtgctccttggctcgaattctctgcactaggtgagaattgctgacaacaaggaatgagagattgatgttaaagctattgaatttgatatgaaatttaatgtcctggaaacatttggtaggtgggagggagggggtagcatatgcagagacacttcgcccatgtgtgctatgatgtgatgcatgctgttggaaggactactttaagtttattttccctctttaggggaatgagcagggggaaggttattagacttcatcggcggaagcaggacaacatatcaggtgagcggaagatgggttaggtccacaatttgacataaaaatattctgtgatctgaatgttcattttaagaacccctcttggccaggcgcagtggcttacgcctgtaatctcaccacttagggaggccaaagcgggcggatcacctgaggtcgggagtttgagaccagcctgaccaacatggagaaaccccatctctactgaaaatccaaaatagccaggtgtggtggcgcatgcctgtaatcccagctacttgggaggctgaggcaggagaatcgcttgaacccgggaggcggaagttgccatgagctgagattgcgccagtgcactccagcctgggcaacaagagcaaaactccctctcaaaaaaaaaaaaaaaaaaaaaagaacccctcttacaagttcccatggtcccccagccagctcttttcacagaaagagatagaagtcctctcaagaccactgtatagttctctcattgtaaacgaaatgtgttgagaacagtttagtcctgtagcaaagtattccttgtgaacacaaaaaatatggattcctgttttaaaaattagccagtctcaaattgttatagattgagtcagcgaagcttagggactgaatacaaggggagaaataaataccatgaggaacagggtttatatgcttaatgccaatgacatagaatcttgttttcttaaggaagatgagtatttaacgttgctttacagatgataagagttaatagtggaagtaatggcttactgcatgtggggcacacctaaaagaataagctacttttaatgtacttttgaggctattagtacctgaactatgaaatcatcatttttcaggtggggatagcagtgcaacagaaagctgggatgaggagctttctccttccactgtgttgtatacagcaacacagcacacacctacaagcatcaccttaactgttagaagaaccaaacccaagaagcggaaaaagagtccagaaaagggtcgtgcagcaccaaagacgaagaaaatcaaggtatgcagggtaaaaatatcttaaatagaaattgtctgaaatagcttaaattttggagcaagaatgcaccaaaattcttttaagaagtttgatccaggtgtttgaagggccacttttgttctacttgcaaaaatcagctaatctgtgttatgtacatgtagaccaacctctcttctgccacaccatatcatcaccactggctcaaagtttcttctactccagtccccatcccaggtatgaaattccagccctacctggcacaatcccgtatgtgttgcagcctcaagtctaggcttccactatccttacagtatctccccacctctcaaccccaaagtacagtctgaaattcttgtcctggttacatgcctcatgtctttgggttgattgtttttccttgtttcaaaaaaaataaaaatcaggaaacatctcttgtatggtctaggtttcctcagtgtcatggtcactttcctgtattctcagctaaaatgtctacgggagaaacttcttctggtttgtgttctttcttccccatcacagcaactttgttgcttctaggtgacttgttcatcccttgttaaggggattggtctttgtttccttcttagtttcaaaactggtaaatctgcaactttaaagtttttttttatttactttttctcttagtatcagaggtgcatataggatttaagagatgcatgctcttccctgttaattacctagcttcacagtagaaagtattaaaattagtctcagagttcattggccttgagctacccctattcttggtaatagtttggggaattccattgtattttttacctagagaaagggggacagaatagaacactagtttgtgccttagttttagtctcagataggtataactgtcattcttggtaccaagttttgtttgttctacttgttttcctccttgggataggcatttcgagagggatcccggaagtccttgcggatgaaggtaaggggtaatcttcgctgatgctgtgttttacttcactgtgatcttgcattttggtcagcttctttcctgacattgatggtctgggaatcttggactctgcttttcattagtttgtagttgttgccattcagttttcatagagcttttctccaaagtagattttcttggccattttctgaaatattttccctttctgtaatcagccttcattgattggtttttcattcattgctttcctagggggtaagtgacatttttccaaacaaaatgaggctagtgtgttctgtcactgtgattgaactcaaccttaggagtggagtttttctggtaatgatacaggatctcttgtgcatctaccctagcactgtgtgggctttaattgcaggacgcttgtattattgataagaattactgttttctcttagcatatctgtttggtggaaaaaacttaggtaatgctagcatgtttcttaagatatcaaataaaagagtttatgaagtatgattttgtaaagaacttggagaatagagcaagtatgtggaatggtttaaaagaagtgtaaggtgctggttgattaaaaatagcttgccaaaaggagatttgattatgctgtctggtatcctcctttacgtgtgtgtgtgtgtgtgtgtgtgtgtgtataaatatatatatatgaggaaaacatgcctctcaaattattactgggggcttcaaagcatttaaatagaattaaattcaagtttatgagtattcatattcctaaatgatacaaaagcaggatctttcctattgagagttatagggcataaatattaaaatctttagtaaggccaggcgcagtagctcacgcctgtaatcctagcactttggaagaccaaggcaagtggatcacctgaggtcaggaattcaagaccagcctggccaacatggtgaaaccccatctctactaaaaataccaaaattagccaggcgtggtggcaggcacctgtagtcccagctgcttgggaggctgaggcaggagaatcgcttgaacccaggaggcagtggttgtagtgagccgagatcacgccactgcactccagcctgggcaacagagcaagactccatctcaaaaaaaaaaaaaaattcagtaaggataagctttttaggattgctttatgtgcagcaccagtgtgactggtgttagcaaagattacaggtagcactttacctaaagtttgaaggccccacttagtatctatctttaaacagacttgcacatacctgtgaaagagttgggagaggactcagagctacagagcatcagaggcctgggatgtgtcttggaagacaaatcaatcatgcctttgctggatccgtctcttgcaagtggccaagtttgctttagcttcccctttatttttgtctcatttgcttagagaggggccttttaaatagactttggaggcagataatagccctaatcctggctactaaatgcttttctcttatcaagcaactatcataacttatctccagaagctcgaaacctttcaaaagctataaactggctctaccagaaaactgcacataaaccccatattttgcttacagttttgggaggttgacagcctcacaggtgtgttaaaatttagaaaaaaaaattactagtcattttgattcttttaattctaaattgagttataaattttatgctcagaattactagtttaaaactcctccagtgatccaggtgggagccataagaattagaaaaaattatcatttggatttttaatcccagtgtcaagagcagcttccctactgaagacttaattgtaaatcagggtttctcagtcttgacactgttgacagtttggaccagataattctttgttgtggaagggactgttctgtgctttcaagatgtgaacaggatccctggtgtctacccactagatgccggtaacactcatacactcagttgagattatcaaaaatgtcttcagatattaccaaatgtcacctgggtgcaaaatttccctcaattgagaaccactactctaaacccaactgaggtagagtctctaatgccttgaaggatgggacagcagagtaaacacacagtgagattagcgaacaatggctaatactgtgacagaggcttccagaatacagtacacttatcaagtgtaagtttaacaattgccacttaaagctgggaatattgtttggacactgccagtccccctagtctgtaagctccattaagcctaaggttttgcactattcttttgcgcaactgctactgatgtcaagcaggcgatactctgattgtcagtatgttggctttaggtgtttctttagatccctttgtttattgttcagtcttttggactctagtaagaaatgtggagacaatagtgttgattttttttcttctatactcctgttccttgcagaaaggatagtagacaataatcagtcagcaacagtgatgcaaaagtggtaaaagaaagtgttatgataagcatcagtgttttctgtgccattcatagaaagtatatttaattttattgtacctgtttgcaagtttaatgtggacatggattttcaagtagctttggtactacagtgtcttttccttctaatcatcactagcatgacatcatcactgtcagtgtttgttttgttttctgatggcacttaagtcttgaacaccgtggaggagaacatgtattgggcttatgctttgtctctgtagctcaggcactgtctgcctaggaagctgttcctgagttgtagtaatcttttctcaatactgtcaccatagagggcaatggttttcctagaggagtatagcaaagtacctcctagacattttctatattctccctacctactcctctcccctcacttcacctcttcagattatttagaatgtggtaatttaaattgttgaaaatagagtgttagaaagatatactcaaataataactttttatatgggtagtaagattgggattggattaatgagattgattgattaagatcacatctaggtttagaatgaacatgtattatgaaaataataagtgatacaaaaacatgcattctcctggagaatagtcaaaaaaccagtttgggctaacacttaacacagatattcagtgagtatgaaaaatttaagcagtgataaatttgaggtctctactgttcatttgtatgaagattttcttatgaacttgatgtcagtcctttgattagaaaattgatttttatgactttaaaatggtcataaaatcacagtgatgggatgaaactatgatccagattaatttcttactttataaatggagaaactgagcttccccatttaaagaagttattcaaggtctcacctctcattggtaacaaaagcatgatagaaaccagatcctctgactcccagtccattactcttttatgccacatcaattgccaagtgataaattttctctggaaccccagcttgtcccacccccattcccaaccctctatttatgcatggactttactaacctccctgaatttgttttctacagaattctccctctgaagcacagaatttagatgagaatacaactgagggctggg

SEQ ID NO: 364 - DNA, 2030 bp, Homo sapiens
  source 1..2030: mol_type = genomic DNA
gtatccctgctggagtaccgaaaacggaaacaagaagctaaggaaaattctgctggtgggggaggtgactctgcacagagcaaaagcaagtctgcaggagctgggcaaggcagcagtaactccgtttccgacactggtgcccatggtgtgcagggatcctcagcccgaactccatcttcccctcacaaaaaattctccccatctcattcctctatgtcccatttggaggcggtaagcccatcagattccagaggcacttcttcatctcactgcagacctcaagagaatatcagcagtaggtggtaagtttatatttgatgttttatagttaaattgggggtgggggggagtatatatctaagatcattcccagttttacctaaaatctatgggaacacttgatgggaacatctgagacagccagccaacagtaccatctgtcctgttcagctgatttaataatgtcagctgcaaccccccagctttgcagaattaagaattaccaacatgcctgtggagcagtgctttggatgacatgtagttatggatgcagatgagctctttcatttggtgggcactaacactgcctttcctatttctcatttcacatgaaaggtgagtcaagaatccagccaagttccacatgaattaacaacagatgtctctcttccacacagctagcatatacagagcaaaaagacattctgaaaggatttgtctggtttaggggagaccacaaatttaaaaatgaataatactggtggcaaatactgaggatcaaatgtgtgaaatagagaatgaagcacaggagttcagggatcttgaactgaaaaaaataagtctgggaaagaacagtcctggctcaaatgtttcatgttcattaatctatgaaacctttattaaaccagtactgtgtatcaggcacatgatttcctaaaggagaaattttaacattttaaatgggggttaagggaagttaacatctttaacccactttttccttgatttctttttctttaaaagtggttgttgttgatgtttctcttttgtgcctgacatagttggaggcagaggaaatacgttgttttaaattggttctgaagaaagtaatgtttaagaggatgttttaagaaaatacactgtgcactggttagggcttcatttgttttggttaagtcctgtggcttgaacttgcaccctgttgcctttacaggatggttcccacatcagtagaacgactccgagaaggagggagcatccccaaggtcctccgaagcagcgtgagggtggcccaaaagggagagccctctcccacatgggagagtaacatcacagagaaagactcaggtgagcccatggccttctgctgccaccacattcagggacacatgagccgagtcctgtacagttcatgcctagtgctgagttgaggtgagtcagtttctgatgcagttgggctccaccgcatgctaggttccagcccacttatgctcatttgggctaccacatttgtaagatctagcattgcttgctctctgtctgctcttttttccccaaggaatacctttctgtaactctcatctctccaaagtcctggaaatctacctcgatgaaggatgaagagaaagaagacgggaatcacatcaggcatttagaacatagcccataattaaccactcattttgcccttctggcatgctgcactcacccaatttgtcacaaagagagcagtacgggttggtgatggcactggtgatttaaatgaaaaatggctctttcttacttattctaagaagccaagttgatttttttttatatatgttaccttccagaccctgcagatggagaaggcccagagacattaagctcagcactctctaaaggagcaacagtttacagcccttccagatacagctaccaggtgagatgagaaattgctggtctctagccataggagtgtgttctgggtcccaaattgtcctggtcatcctttgccattgagatgctgtctttgcatatagtttcagcag

SEQ ID NO: 365 - DNA, 32765 bp, Homo sapiens
  source 1..32765: mol_type = genomic DNA
gagtgtaatccattcttatacattgtgactttcttgaaatgtttatatgcagcatgacgaagttgccccttttgcacttccctgactccagcggacgtctagccctgcatcattgttcttgtttttatgtcccagttgaccttggcattttgttttatcactttcctggttgaagccaaaaaacaaagggtactactttcttctttctttccatatgtaccatactttaggggagagaggggccagtgtttggacactgttgatttaaaaaatcttattttcaggatcataattacggagcccctcctcctccgacacctcctgcttctccccctgtccagacgatcatccctcgttctgacctgaatggcctgccgtcgcctgtagaggaacgctgtggagacagcccgaactctgaaggagaaactgtacctacctggtgtccttgtggtctttctcaggatggcttccttctcaactgtgacaagtgcaggtaagatcctgttccatctaaatttaagtctgggttgctgggattagggtttcttacaagtagggaaaagctcaaagtattctttcttgtgtttgttaatgtagatgattccttagtgctccttggctcgaattctctgcactaggtgagaattgctgacaacaaggaatgagagattgatgttaaagctattgaatttgatatgaaatttaatgtcctggaaacatttggtaggtgggagggagggggtagcatatgcagagacacttcgcccatgtgtgctatgatgtgatgcatgctgttggaaggactactttaagtttattttccctctttaggggaatgagcagggggaaggttattagacttcatcggcggaagcaggacaacatatcaggtgagcggaagatgggttaggtccacaatttgacataaaaatattctgtgatctgaatgttcattttaagaacccctcttggccaggcgcagtggcttacgcctgtaatctcaccacttagggaggccaaagcgggcggatcacctgaggtcgggagtttgagaccagcctgaccaacatggagaaaccccatctctactgaaaatccaaaatagccaggtgtggtggcgcatgcctgtaatcccagctacttgggaggctgaggcaggagaatcgcttgaacccgggaggcggaagttgccatgagctgagattgcgccagtgcactccagcctgggcaacaagagcaaaactccctctcaaaaaaaaaaaaaaaaaaaaaagaacccctcttacaagttcccatggtcccccagccagctcttttcacagaaagagatagaagtcctctcaagaccactgtatagttctctcattgtaaacgaaatgtgttgagaacagtttagtcctgtagcaaagtattccttgtgaacacaaaaaatatggattcctgttttaaaaattagccagtctcaaattgttatagattgagtcagcgaagcttagggactgaatacaaggggagaaataaataccatgaggaacagggtttatatgcttaatgccaatgacatagaatcttgttttcttaaggaagatgagtatttaacgttgctttacagatgataagagttaatagtggaagtaatggcttactgcatgtggggcacacctaaaagaataagctacttttaatgtacttttgaggctattagtacctgaactatgaaatcatcatttttcaggtggggatagcagtgcaacagaaagctgggatgaggagctttctccttccactgtgttgtatacagcaacacagcacacacctacaagcatcaccttaactgttagaagaaccaaacccaagaagcggaaaaagagtccagaaaagggtcgtgcagcaccaaagacgaagaaaatcaaggtatgcagggtaaaaatatcttaaatagaaattgtctgaaatagcttaaattttggagcaagaatgcaccaaaattcttttaagaagtttgatccaggtgtttgaagggccacttttgttctacttgcaaaaatcagctaatctgtgttatgtacatgtagaccaacctctcttctgccacaccatatcatcaccactggctcaaagtttcttctactccagtccccatcccaggtatgaaattccagccctacctggcacaatcccgtatgtgttgcagcctcaagtctaggcttccactatccttacagtatctccccacctctcaaccccaaagtacagtctgaaattcttgtcctggttacatgcctcatgtctttgggttgattgtttttccttgtttcaaaaaaaataaaaatcaggaaacatctcttgtatggtctaggtttcctcagtgtcatggtcactttcctgtattctcagctaaaatgtctacgggagaaacttcttctggtttgtgttctttcttccccatcacagcaactttgttgcttctaggtgacttgttcatcccttgttaaggggattggtctttgtttccttcttagtttcaaaactggtaaatctgcaactttaaagtttttttttatttactttttctcttagtatcagaggtgcatataggatttaagagatgcatgctcttccctgttaattacctagcttcacagtagaaagtattaaaattagtctcagagttcattggccttgagctacccctattcttggtaatagtttggggaattccattgtattttttacctagagaaagggggacagaatagaacactagtttgtgccttagttttagtctcagataggtataactgtcattcttggtaccaagttttgtttgttctacttgttttcctccttgggataggcatttcgagagggatcccggaagtccttgcggatgaaggtaaggggtaatcttcgctgatgctgtgttttacttcactgtgatcttgcattttggtcagcttctttcctgacattgatggtctgggaatcttggactctgcttttcattagtttgtagttgttgccattcagttttcatagagcttttctccaaagtagattttcttggccattttctgaaatattttccctttctgtaatcagccttcattgattggtttttcattcattgctttcctagggggtaagtgacatttttccaaacaaaatgaggctagtgtgttctgtcactgtgattgaactcaaccttaggagtggagtttttctggtaatgatacaggatctcttgtgcatctaccctagcactgtgtgggctttaattgcaggacgcttgtattattgataagaattactgttttctcttagcatatctgtttggtggaaaaaacttaggtaatgctagcatgtttcttaagatatcaaataaaagagtttatgaagtatgattttgtaaagaacttggagaatagagcaagtatgtggaatggtttaaaagaagtgtaaggtgctggttgattaaaaatagcttgccaaaaggagatttgattatgctgtctggtatcctcctttacgtgtgtgtgtgtgtgtgtgtgtgtgtgtataaatatatatatatgaggaaaacatgcctctcaaattattactgggggcttcaaagcatttaaatagaattaaattcaagtttatgagtattcatattcctaaatgatacaaaagcaggatctttcctattgagagttatagggcataaatattaaaatctttagtaaggccaggcgcagtagctcacgcctgtaatcctagcactttggaagaccaaggcaagtggatcacctgaggtcaggaattcaagaccagcctggccaacatggtgaaaccccatctctactaaaaataccaaaattagccaggcgtggtggcaggcacctgtagtcccagctgcttgggaggctgaggcaggagaatcgcttgaacccaggaggcagtggttgtagtgagccgagatcacgccactgcactccagcctgggcaacagagcaagactccatctcaaaaaaaaaaaaaaattcagtaaggataagctttttaggattgctttatgtgcagcaccagtgtgactggtgttagcaaagattacaggtagcactttacctaaagtttgaaggccccacttagtatctatctttaaacagacttgcacatacctgtgaaagagttgggagaggactcagagctacagagcatcagaggcctgggatgtgtcttggaagacaaatcaatcatgcctttgctggatccgtctcttgcaagtggccaagtttgctttagcttcccctttatttttgtctcatttgcttagagaggggccttttaaatagactttggaggcagataatagccctaatcctggctactaaatgcttttctcttatcaagcaactatcataacttatctccagaagctcgaaacctttcaaaagctataaactggctctaccagaaaactgcacataaaccccatattttgcttacagttttgggaggttgacagcctcacaggtgtgttaaaatttagaaaaaaaaattactagtcattttgattcttttaattctaaattgagttataaattttatgctcagaattactagtttaaaactcctccagtgatccaggtgggagccataagaattagaaaaaattatcatttggatttttaatcccagtgtcaagagcagcttccctactgaagacttaattgtaaatcagggtttctcagtcttgacactgttgacagtttggaccagataattctttgttgtggaagggactgttctgtgctttcaagatgtgaacaggatccctggtgtctacccactagatgccggtaacactcatacactcagttgagattatcaaaaatgtcttcagatattaccaaatgtcacctgggtgcaaaatttccctcaattgagaaccactactctaaacccaactgaggtagagtctctaatgccttgaaggatgggacagcagagtaaacacacagtgagattagcgaacaatggctaatactgtgacagaggcttccagaatacagtacacttatcaagtgtaagtttaacaattgccacttaaagctgggaatattgtttggacactgccagtccccctagtctgtaagctccattaagcctaaggttttgcactattcttttgcgcaactgctactgatgtcaagcaggcgatactctgattgtcagtatgttggctttaggtgtttctttagatccctttgtttattgttcagtcttttggactctagtaagaaatgtggagacaatagtgttgattttttttcttctatactcctgttccttgcagaaaggatagtagacaataatcagtcagcaacagtgatgcaaaagtggtaaaagaaagtgttatgataagcatcagtgttttctgtgccattcatagaaagtatatttaattttattgtacctgtttgcaagtttaatgtggacatggattttcaagtagctttggtactacagtgtcttttccttctaatcatcactagcatgacatcatcactgtcagtgtttgttttgttttctgatggcacttaagtcttgaacaccgtggaggagaacatgtattgggcttatgctttgtctctgtagctcaggcactgtctgcctaggaagctgttcctgagttgtagtaatcttttctcaatactgtcaccatagagggcaatggttttcctagaggagtatagcaaagtacctcctagacattttctatattctccctacctactcctctcccctcacttcacctcttcagattatttagaatgtggtaatttaaattgttgaaaatagagtgttagaaagatatactcaaataataactttttatatgggtagtaagattgggattggattaatgagattgattgattaagatcacatctaggtttagaatgaacatgtattatgaaaataataagtgatacaaaaacatgcattctcctggagaatagtcaaaaaaccagtttgggctaacacttaacacagatattcagtgagtatgaaaaatttaagcagtgataaatttgaggtctctactgttcatttgtatgaagattttcttatgaacttgatgtcagtcctttgattagaaaattgatttttatgactttaaaatggtcataaaatcacagtgatgggatgaaactatgatccagattaatttcttactttataaatggagaaactgagcttccccatttaaagaagttattcaaggtctcacctctcattggtaacaaaagcatgatagaaaccagatcctctgactcccagtccattactcttttatgccacatcaattgccaagtgataaattttctctggaaccccagcttgtcccacccccattcccaaccctctatttatgcatggactttactaacctccctgaatttgttttctacagaattctccctctgaagcacagaatttagatgagaatacaactgagggctgggaaaatcggataagactatggactgaccagtatgaagaagctttcactaatcagtacagtgcagatgtacagaacgcgcttgaacaacacctacattctagcaaggaatttgtgggcaaacctactattttagacactattaataagactgaattggcctgtaataacacagttattggttcccaaatgcaggtaagcaccaaagggttgaggactctctaagtagctgaaattttaagaacccaggaagagggtaatggattggaattactgttccttccaaatgtacaaggccatggaataacagattagccaggtgttgatcatatgtaaccaaaagtaggttatattaactggaaactacctggatacatatttttaaactacctttattaataaaaaaatagatgaattgaggctgtgtgcagtgcagtggctcactcctataatacaacactttggcaagaagccaaggtggaaggattgcttgaggccagcagttcaagaccagcctgtacaacatagtgagaccctctctttacaaaaaaaaaaaattaaaagccgttgtgatgatacacacctgtaagtcccagctactggggaggctgaggtggaaggatcacttgaatgaatttgaggttatagtaagctatgattgcaccactgcactccagcctgaatgaaagagtgagaccctggctctatttaaaaaacagagagagagatgacttagtatgggaaattctatataccctaggtaggaattatgtaatatttatagaaagttaagcatgttctttctcatctttattttagagatagagtcactgaagtcttaatcatgtattttttttttttttttaatattttcttgccgtttctggggaggcaatttcactagatgtagcatgtctcttagaaaaattgagctttcatcacattttaaaatttctcatcattgatctaaataacatgtacagataaaacctgaaaatattagcatgttttccttaattatgaagtaatttgagtgtctactaaggtgttcttgctgttgtttaatgttattgctctggttttattcagttacagctgggaagagtcactcgtgttcaaaagcaccggaagatcctgagggctgcaagagatttggctttggacactcttataatagagtatcgtgggaaagtcatgttacgacagcaatttgaggtcaatgggcatttcttcaaaaagtaagaacgtcattcattgagcagtgagggctaaggtggacctggttgaccagtgttgttgtaaaaatcattctgtttgataagacgctcttgggagaaaaaaatcacaactcagataagctcacacctgtctgctatttgtagagaagtgcaagtaaatcttcaaattgttcaatgtataaaatggtgacacctcctttccaagccaagcattccttgctttgtgcttgttctttaatcaaaagcagacaaacgtgatgctttcccaagtttaggcgttgcaaaagactgctgctgcttctctcagcatatgcttcatatttggagtcatggggtggccttcttatttgtgttgagaattacaggaattttaattgtatccctagaccatacccctttgtgctcttctactcaaaattcaatggtgtagagatgtgtgtggatgcccgtactttcggtaatgatgctcggttcatcagaagatcatgtacaccaaatgcagaggtaagatatctgtagcaacttccctttgactggaaccatcaaatgacaagcttactgaagaagcagtgtgaaaacttcactcagataaaggtctgtagataatagtcgtgatatttcatcgtgggaggtgaaaaacaaaagtaatggtgcttttatacgacaaaatgggcgcaaggaaagagttttctttagagaaggcagaaatagaaaagagcaagttagcatttgctaaggagaaaaagctagactggataagaaaatcaagtgtagttatattaaagagattgccatacggtggaagtagatgttgttaggcctaactaagctatttggttgcagtttttttagattttagtgagtaatgttttatgagaggatctagacatttctagaattcattactcagagcaaccacatcaaataaagcaagaaaatccacagagctttacttactggctaaggaattttaattctctggtggagctggaaacagctataagatgtgaaagcggctgggcgcagtggctcatgcctgtaatcccagcacttcggaaggctgaggtgggcagataacaaggtcaggagttcgagaccagcctggccaacatggtgaaaccccgtctctactaaaaaaaaatagaaaacttagccaggcattgtggcgtgtgcctgtattcccaggtactcaggaggctgagacaggagaattgcttgaacccgggaggcagaggttgccgtgagccgagatcacgccactccactccagcctgagcgacagagcaagactgtatctcaaaaaaaagatgtgaaagtagagattttaccctgatttctaacatctcaaggtttctccacatatttaagaaagtattataaattttcaagccagtgcagtataatagtttcagatgaaatgaaggggttaaataacagattaccataactccttaaataaataatagattaccataactccaaatggagagaaagtatggtttttttctctcttacggaaagttcatggtctttatgaaaaatccaaccagaagccttttcacacaggtgcgacacatgattgcagatgggatgattcacctgtgcatctatgctgtgtctgccatcaccaaggatgctgaggtcaccatagcatttgattatgagtatagtaactggtaagacctcagaaacctttcctaacaggaatatccatgtcttacatattaagctattcactctatttaaagtctgctcttgtttcttgccttttcctttgtttacttaatcttttcatgactaatgaattttctgcctagaaattgtaaaggaaaagacaggcaagattttttttagagatacggataccttgtatgatactgctcacaaatttcctgacagaagtgttttcgcttatgcctttttagcaagaatagcaaaatggatatatatgtatgtatgagacactcctggaaattacaatagcatcctgttgttatgcacagagtacttatgtcagggaccatatagaatgagaatttaggccaggcgcagtggctcacaggcctgtaatctcaacactttggaaggctgaggcgggcggatcacgaggtcaggagatcgagaccatcctggccaatgatgaaaccctgtctctactaaaaacacaaaaattagctgggcgtggcggcacacgcctgtagtcccagccacttgagaggctgaggcaggagaatcactcgaacctgagaggctgaggctgcagtaagccaagatcacgccactgcactccagcctggcaacagagggagactctgtcttaaaaaaaaagagagagaatttaatatgttacctctacttttaatttgtcaattatacccttataaagctaggggtgagatttaaagatccaccctgtccacagaaaccatgttatctagctgtatatgacagtgcagaaaaccataaagggcaattcatagatgaatatgtgggattttttaaagtatatgctttttgttctttggtcatttggggcaaaatagaggttatgtggtaaagtgatgtttggcccaggtataaggaaaaaagatgttctgcttaattcatcaaggaaaataaaaaaggttttaagaaggttataaaaggttttaagaagtagggaattagtaggtaaaagtgaggacatggtaatcgtgggcacaagatgagtatggccacatcagactttatcattgataaactgcctgctaaatagccaataaaccactggggggattgaatttagggagggctttcttttttttttcccactgaccatggagtagaattggggttacacaaagaaagacagaatattgaaagtgttacgtcaggcgcggtgactgacgcctgtaatcccagcactttgggaggctaaggctggaggatcacttgagcccaggagttcaagaccagcctagacaacatggcaaaaccccgtctctgccgaaaataaaaaaattagctgggcgtgtagtcccagctactcaggaggctgaggtaggaggatcacttgagcccaggaaacagagattaccgagagctgtgatgcaccactgcactccagcctagatgacagagcgagattccgtctccaataaaaagaaaaacaaaagtatttataggactctctaatgtctctgtttaacttattcagagacaatatcagaggaagttactgtactgatattttaagagggtgaatggataatgtaactgaatttcaagggtactgagacaggcattttggttgtttctttggagcagtaattataaagtggactgtgcctgtcacaagggaaaccggaattgtcctatacaaaaaaggaatcctaatgctacagaactgccactcctaccacctcctccaagcctacccaccattggagcagagactagacgtagaaaagcacgacggaaagagctagagatggagcagcagaatgaggcttcagaggagaataatgaccagcaatcacaagaagttccagaaaaagtaactgtatccagtgatcatgaggtaatcgcccctggtcaaatgatgatgctatggcatcaatcctccaaaggaagaggaacccgggttgccgcatggtttaagtaggggagctatagtaacacttagtgccctttatatcaatgtgggtttattgtgttcatacatttctttctgttttacaaagtcaaaaacatcctttgctggttttgcaccagagaataggggttagttatcatctgtgtttaccatgtggcctcacatgagttaacagtttaaagcactagagattgttatagagagttttaagctaccagaataaaacagattgattttttctcagagcttgagtacagctgaatattgcctctatcttaaaggaagtagacaatccagaagaaaaaccagaagaagagaaagaagaggttatagatgaccaggagaacctagctcatagcaggagggtgagtactgtctgacattactttgctccttctcattcctgctacctccatcatgtgaacctcttctgttctcttgactttgtatcatctcattgatttgacctgaaggttataatttgggctttttccgtaataaagattttattataatttttttatttatttttctctatacacacagtagttttgtagtgattattatctagtgatggtttgaagaggttgtttttttttttttttttttttttactaacaatctggtttccgctgggcgcggtggctcacgcctgtaatcccagcactttgggagggcgaggtgggcggatcacgaggtcaggagatcgagaccatcctcgctaacacggtgaaaccttgtctctactaaaaatacaaaaaattagccgggcgcggtggcgggtgcctgtagtcccagctactcgggaggctaaggcaggagaatggcatgaacctgggaggcagagcttgcagtgagtggagatagcgccactgcactccggcctgggcaaaagagcgagactccatctcaaaaaaaaaaaaaaaaaaaaaatctggtttccgaaaaactggctggtcagaatcaaaatgtattatagttggtttgctctgaattaggaattttctaggtttttgtgagttctgaagtttttttaaacccttttagtcatatgaactaaaattttctacttttatgctgaaaccaatcctgtgtgtttatgaccctgatttgatgacttttttttttttctttttgagaccgactcttgctctgtcaccaggctggagtgcagtggcgcaatctcaactcaccacaatctctgcctcccgggttcaagcaattccccttccttagcctcccaagtagctggcattacaagcatgcgccaccatgcctgggtaattttttgtattttagtagagacggagtttcaccatgttggccacgacggtctcaatctcccgacctcatgatcttcccacctcagcctcccaaagtactgggattacaggcgtgagccactgcacccatcctgtttttctttcatattaaagtttcaaaataactgaccctttttgaaaagtttatgtttgaccttgcctttatttacaactattccccacatttaaaatgaaatattttatttttaatcttctgttttccaagttatatgtgtcatcttactggtagttaaatgaatttctgtaaatttccattaaaaatacttttataaaagctatccactcgtcctcatttgaagcttccttctacaccagtactatctctttctagaccagggaagatagaaaggtagaagccatcatgcatgcttttgaaaacttagagaaaagaaagaagcggcgggatcagcccttggaacagagcaactctgatgtagagattactacaaccacctcagagactcctgttggtgaagagacaaaaactgaagcccctgaatctgaagttagcaactctgtttcaaatgttaccatcccaagcaccccacagagtgttggtgtgaatacccggaggtcttcccaagcaggggtaagagttgaaaagacttcagcacttagacatcctcacctttgctaatgtcaatacctaacttttggaatttttaaaatcagtgttttcagctttgctccatatcacaataaataaggccattaactgtttaactggaaccatttcattggcctattttataaatgcttattagaaataacgcaaacatttgtcgctagcctctttagctcatttaagtgtatacatttttgtatttaaaaattagattttaaattagtgtttctaatccttatatttttcatcagtagacattctgaatgcttaaagtgaataggaaattagactgtttgctgataaaacatttctggtaagcatctgaccctactattgctacaggatattgctgcagaaaaactagtccccaagccacctccagcaaagccttctaggccccggccgaagagtcgaatttctcggtacaggaccagttcagcccaaagactaaagcgtcagaagcaggccaatgcacagcaggcagaattgtcacaagctgccttggaagagggaggaagtaacagtttagtaactcctactgaagctggaagtctagacagttcaggagaaaacaggccattaacagggtctgacccaactgtggtgtcaattactggatcccatgtcaaccgtgctgcatctaaataccccaaaaccaaaaaggtaagtcacaaatgcatcctttataagtccagtctggcaagggctgtcttagtgaaatgagaggacctataatccctagaagaaactaatctcaatattactagattgaaagttctaaaatgctttgacacaaaaggctggagtcatcctgctacctgtttccttatttttagtcagcttaaatcactgatagctgaaattattcctctcttagtgggcgtggagagggtgaaggaagatatccttgtgttctagttgctcaattcattcttactgcagctgctgcatctcctcctgtcctagtttctagatgacgtttgtctttatgaactacactgctacctcttgatttataaactaatgatctcttttttaccttagtatctagttacagaatggttgaatgacaaagcagagaagcaagagtgccctgttgagtgccctttacgtatcacaacggatccaactgtactggcaacgaccctaaacatgttaccaggtcttatccattccccgttaatttgcaccacccccaaacactacattcgctttggctcaccctttatccctgagagacgtcgaaggccccttctgcctgatggcacattcagctcctgtaagaaggtatgtctgtgtttttgtgtgtgtgttgtgtttatgtgtgtgtgctttatttttttaagcctaagattcctatcatcatgacataaataaaatgttctctagatagccactctgcccatgtgagtttataatgagttagttgttcagccataaatactgattcatcaagagtctgtgagactgtggtggaatgaatgtactgcatttttagtgctcagatttgtgactggtcactgatgtctcttctgagaacccttgaggttcctgagtgagagcacacagcagtggatgactgggtagagacggatatgttttgtgtgtgctcttgtgatatgggttaacatgtccatttatgattattgtgtgagattaggccctgggtcctctagaacactgttgcataaatgaaaaaaattaaattgttttgaatcaattcaaccgttattatccactatcatcacttgaaggaaattagaggaaaaatcctattgtaattggcataattcctgttccttgatcaaatgacaagtcggactgtttattccaagagaatacagaatctaccctaaaagactctctttccctctctgtttctgcctctttctcctctttccagttacttactgtttttggatctagtggcagtagcgtttggtggtgtttttggaatgctctttcttaattcccagaagccctgcatattttccaaaggtgtctcttaggaatagatcactccctcagatctatgatgtcgttttccatgtttctagaagtataggacaccctttcatttggtcttcctttgaggtagagtctgttccctggaacacccttttctcttatcctcagatctggattcaggctgccttcctcagtgtctgccattgccctcctccactggcatcacgtacatgaggatgctgcatgtagattatttgatgtgatgaagtctccaactccaggcaggtcttccctgactcctccaaacttaaaagcttttctctttccccaaagaacagaagttatttctccgggggaggggggcatgaaagatgagccaaagtggtgtgggatatggaggggaggagggcaataggaatctgcaaaaaggaaggacactactgctgaatgagcagcacattgcagaaagtcttttcctaattgcacatcttacctaaacattggaatcactcattggtttgttcggggaaacgctcgtagaattcctaaagagaaatttgaccatttctaaggatgttaactgttgaagcatcttatcaagccaggtcgtacaatctcctattttggtcctttaaggagtgtaggcaattatttattacagataagtaatgaagtctgagctgcaaataatatgaactaggctcttgaattgaaattccttcttgataattctaatgctgggttgcagtctttctgtttccatcttttccaactagcagagacttaacgaaaaccaaaaacgtgtctaggactgtaacttcagatctggtagaaaatgcatttctttaagcttttttaacttggttctgcttttatacttgtatctatagcacatccttaaatttctacgggcaacagatagaaattccatttaacacaagtccctgttatattctccaagtgtatctgactatccttaatctcatttatacaggctctactcaagcacttttatctatgtgtcatggttagtctttaggaagagtttaggctgcatacacaggattatcataacaagactatttaaataggatctttaaaaactgtttaagtcattgctttattgtgtgctgttcacatatcaagattctattttttaaaatacagctttttatgaggcaaaataaaatgaaatggaatgttttagctagaatagaatttggctttatagcagtgaagaagagttcttcttctaatattggtcttcttctaatatctcctaatattggttagaaaggacttacctaatgcagaacctaagaacattttcattattcaacaaaattgtaataaaattctgaaaatccctcagagtataagttaatcagatagataagaaaaccctccatgggattatttagaacaatgtatatttctaataggctcactgtttcatatctcactaaagaggtaagggcctggccttgtaagttaaaaacttaccagtataggacaaattaaagttgtatctgtatagttgtactcagattcttatgctatttatttttatttttatcattattattctgcaacttctgaaaagaagaggagttcaggtatttgacagaacattttatgatatccctagagtttctaaattgaatcatagtttttaagaagcattttgcattttttagttcctcagttggtattttaaaaacatttataagtggccaacaaggctctcagtagtgtttcaccttgttctctctaaactcctcttctaaacacaatgtgtatagggcatttggtctccagacttcttagaaaaaccagtctgactgataatgaaacagtgtgctttgcattgataattaatatttcattttatacactggagcattatctgtaaatctccaaacatagcattgaaatttagttgaaccgggactcggtgaaaatctgctcagtgttcagtactgtactataagctttcttcacatacattatctcacttaccatgcatgaaattgggatcattgtcctaaatttatatatccagaagctttgtctcagaaatgtttggtaacttgtccaaagtgaagcagctaataagtgacacagccagatttcttctggtgggggatagtaggggttcacagggtctcactgttgtccaggctggagtgcagtggcatcatcacaggctcactgcagccttgacctcctgggctcaaatggtcctcctacctcaacctctcgtgtagctgggaccacaggcacaccaccacgcctggctaatattcatattttttgtagcgacagggttttgctgtgtttcctaggctgatctcaaactcctgagtgcaaggagtctgcccaccttggcctcacattctgctgggattacagatacgagctactgagcccagcctcacagccaagtgtcaagccagggcttctggactccaaaacctgtattgcttccttgctctttcgccataatagcgagacctttaaaatatttatccatctttgagcctcccagaaaactcctttgcaatatattttaatagaggttcagagaagggagaaatgttcttttgattttaacaacttgctgagtaggtgcatctaaaattaacttattatccatgaggttaattgtatcttgttagatacaaacaaatgtccatgttccttttttatatgagtcctgaaatattgtaaaattatacaacagaacctggaggagtaggtttgattgtatttgctgtgtttcacctcatagctaaccatggtagcatctttcttctagaatactcctgttctgattttatgttccctttttgtagtcatcagatccagaatgtaaattattttacaagtacatctactagaccctggaaatattaaaaaattactcagataggaaagcttagtgaccccaaatgagtgttttctgctttgaaaagaaaaacttaaaggtggccataacaaaagatttttcactcctgagcctaatttttccatttataaaatgagtgctttggacaagatgacttctaagttctcttctaagctttaaggctatatgtatggttctgacaattcatctttacatcattattctgtatctaagatagttcattcttcggattttttattttgtttttgtgtttgcttttcagagacctggttgtatcctaaaatgtttacgtgattcaaattaccattgagagctcttttttatatccttgttcactcttccttccaagtgtttacaggtttacagtttcagttttgctttcatttggccagccacaatgacatttgtatgatgtaagatttttttttttttttttttttttttggtaaaatttttgtggattgtttcctaggtttctaagagggaaaatctatgagaattgctctctggtgaagagagtatttacttacctgtaatacatgttctctaaaggtataaattataataattcacctttgctcttcctattgggggagggtcttactcagaaattgatgtttatcaaaattcgatctgtcttatgtcagggcaggagagccacagagtggtgagcaacctacaactgtatatcttaagagaacacaattacaggtaagaaattttctgtcttccacaggatacataatcttattatcctaatctttgcaggtttactatctggcctaaatttatttcttgtcagtttattattctaatctttactaccaaaaacttgtgactgataggtcttctttttgactttttcccttttttttgatttctactgaagctcatttcgtgatttgcattactcatgcataatttaaccaaactacttgttggaggggggagtcccataggttatttcatttgaaataaaccttttggaaacgcttttggtacctgtagtgaagagctattaatcctcatccaaaatcttccaatgaatcttttttattacctcttcacacgtctctagcacggggcagacaacttttaagagatctttatcttccttctaggcgcttattttatatattagttttattctatacgatcacagtctctcctaaataaatgttaagatttcttcctcagtcttgccattttacaccatcccaaatggtatgaaaagttgaatagcagtcattttttattggtttttgtcttttgatgggatctcattatatgtaatccagatttcctcaagtttttcagttaaaaggaattgataggacaatgttccaatatgctgagacacaagacaataaaatgcttgactgtgtaactgaattagtgtgttgaattgtatcactcaccagttgatgtacatttaaaacaggtgcactaaatagttttagataattattgataattctctggttcttttcaattatagcgctggataaaacaagccttagaagaagggatgactcaaacatcatctgtaccccaagagactagaactcagcacctataccaaagcaatgagaatagtagctcttctagtatctgcaaagacaatgcaggtacgtatctaaaacctttctgattatatgaccaatgattgtttcaggtctgcataaaaaatttaagtatgagtatttctgatacaaaaagaaatggcgtgttttctaaatagttactttacatctgtctttacagaggaagagagagatctcaagtcagggatcagttttcccaggacgacaaagaaggactagacagtgtacagataacagcagaaatggttataaaaaaggttagatacatttaaagtagtaagtttaggaaatttatattcatatttataagatggggcaagggcaagaaagtggtggaacactaatattcaggaaagaattaaaattctgagtgattaagttgggtgggacatggttgagggagcaggggatgaatgaaataagtgaaaaattattatcaattgattgttttcaaaggggcttgtataattagcatacaatttttaaaagaacagccgggcgctgtggctcgcacctgtaatcccagcactttgggaagccaaggtgggtggatcacctgaggtcaggagttcgagaccaacgtggccaacatggtgaaaccctgtctctaccaaaaatgcaaaaattagctgggtgtggtggcaggtgcctgtaatccctccctaaacaggaggctgaggcagtggagaatcacttgaacccgggaggtggaggttacagtgagccaagatcacgccactgcactccagcctgggcgacaagaatgaaactccgtctcaaaaaaaaaaaaaaaaaaaaaaaaaaaacaaattttttaagacagctttaaatctaaagtctttgtgcatttttaaactagatgtcaatgaaaaatcatctgttccattggttttgacagtgacttgcaaaggatgtaattgaaagcacttgtgatatcttaatgtattttgtgacaatctttttaccagtttctcctgcaaatatcagcttaattgaaaagttctttgtgattttcataacttttctctaaatcagttttttaaatattagacaatcaaaataccaaagtaaattagatgctaaagcaacctttcaggttgcaacaaacagaatatttcacattttcataaaaaacccacttcattgttcctgtttaccaacttgctgaataaatgtaatgaacttgaatttaattagataaatttttagtagcagatattgcaactaaaatcagaacttttcttaaagttcttacttcatttggattttacttctttttagattttatttcagaaaacgtgaattgcctttttttctttttttcttttttttttttttttttttttgaaatggagaatcaagcgattctccctgcctcagcctcccgagtaactgggattacaggcgcccgccacctcacccggcaaatttttatattttgagtagagacggggtttcaccatgttggccaggctagtctcgaactcctgacctcaggagatccgcccacctcggcttcccaaagtgctgggattacaggcatgagccaccatgcctggctgtgaattgccattttttaaattatggatttagtttattcttttgtctctagattagattatacctcataagttaccacctatatacctcaggataataaaattccagttatctgaaagataaattatactgtttatttaaaatattttcttctagtattcaccaaaaattagggatatttagtcaaatatgaatagtataaagaaatcttggtaccagatttccatttgtattatttcttttttaacagcttttaaggtgttagtaagaatataacttagctgaaatagactatcatgtttgtgtatctatctggtgtgtgtgttaatgcatgtgtatagttaaggttgggaacaggagattgcatagcagttcacatcctgactagcaaaggattataggaaaagtgtctttgttatcacatgccctggttggaaggaaattaggattcctagtcaccagccttttttgttattgttgagcttctgccctagtctaacagtgagaaacactcacaggacacaccttgcccttaaaaagcaatgtaggaaaatatttgattttaaaaatcaagcagcagtcaaatgcgcaagttatattgctacaaaattagcataaattctgaggaattacttttatttgttggctctcttttgtttttttcaagaataccaaagagacattaagaaaggggaaaggatttctataatagaaaaaatcaaacagacctttacttgaaaaccagctgtcccctttactaactatatgatgttactagaagtctctgaggctaggcgttggtggctcacacctgtaatcccagcactttgggaggccaaggtgggcggatcatctgaggtcaggagttcaagaccagcctggccaacatggtgaaaccctgtctctactaaaaatacaaaaattagctgggcctggtcacgtacctgtaatcccagctatttgggaggctgaggcaggagaattgcttgaacctggaggtggaggttgcagtgagacgagattgcgccactccactccagcctgggtgacggagggagattctgtctttaaaacttaaaaaaaaaaaaaaaaacaagtctctgagcctcatttgtaaaatgggaatagcaatacctgctttatagagctaacattagaatgaataatgtatataaagttctcaatatagtatcaggcccataagagtaattattatacggtcattattctacacagaatactctttcttgtagagtatttgtggattaataaatacattaaagattctggctgggtgtgatggctcacgcctgtaatcccagcactttgggaggctgaggcgggcagatcacgaggtgaaaagattgagaccatcctggccaacatggtgaaatcccatctctactaaaaatacaaaaaaaattagctgggcatggtggcatgcacctgtagtcccagctactcaggaggctgaggcaggaggattgcttgaacctgggaggcagaagttgcagtgagccaaggtcacgccactgcactccagcctggcaatagagtgagactccgtctcaaaaagaaagaaagaaagaaagagagggagggaagaaagaaaagagaaaagaaaagaagaaagaaatacactaaatattttaagttcctaaaagctgaaactttatagaaataaaagttattatcaaagtagggcaggggcatgatgttcattatttgtaaatgatgtgggtctattcttagaagagcctaagtaatcagctgaaaaacttagaattaataataagagtttaggccaggcgtggtggctcacgcctgtaatcccagcactttgggaggccgagatgggtggatcacaaggtcaggagatcgagaccatccttgctaacacagtgaaaccccatctctactaaaaatacaaaaaattagctgtgcgtggtggtgggcacttgtagtcccgctactcggggggctgaggcaggaaaatagcatgaacccaggaggcggaggttgcagtgagctgagatcgcgccactgcactcctgcctgggcaatagagtgagactctgtctcaaaaaatatatatatatactaataataataataagagtttattaatatcactggatagaaggataaatatataaaaagtgtaaatatattttaaaaaatcatttatataccaagaaagtaaatgaataccaattttttttgttcccaaacttaacaaaactaagaaactgcctaggaataaccttagttgggtatatggagtaaactgttactgagaaatatttttaaagtctgaggaaatggaaatttctttttctttttttttttttcatgaatcatacgtgagcctttgataaatttcatgttcattatggaaagaatatatatatgtgtatatatatatttctttctctttctctctgtctttatatagttcccatgaaactgccttgtttttggaatttgattaaatgattctgaagtctacctttaaaaaaataagaaaaaaattgaaaaaataataatgaagtactttctcttgaggtgtaagacgagcttctagtatgaagctaatagttaaatttagtataatattgatgcaagaatggatgtatatatggaacaaaatagtcagaataggcctaaatataaatgtaaaagttggtaaattgtcatggaatttttagttaggagattgaaaaagaattagaatctagctggacacggtggcacgtgcctgtaactctcaactacttgggaggctgaggtaggaggatcactcaagcccaggagtcaagttcaacctgcgcaacacagcaagaccttgtcttcaaaagaactactaggtcctttgccaaagaaaattctaggcacattcaaatatatatatttttttaattcaaacttgggcctggcatggtgactctcacctgcaatttccagctctttgggatgccaaggcagaaggatcacttgaggccaggaatttgagaccagcctgggcagcagagagagacccacatctctacaaaaaataaaaattagccaggcatgatggtgggttgcctgtagccttaaggaggctgaagtaggaggatgacttgagcccaagaatttgaggctgcagtgagctgtgataatgccactgcgttccagcctgaatgacagcaagacatctgtctctaaaaataataaaataaataattcaaactgtattaaccatgtttttgtgtctatactgcctctgtattaatagaggattagtacattggggaaaggatttgcagtaaaactgccggggagtaatatccctgctagcaatctgataaaatttatcatgtgcattaaaaatattcataatccttaacctagtagtcgttcatttgttctgcttggtatctttcctacagaaatagacaaagaaaccaaaatttatatataaggttggtgcaaaagtaattgcgtttttggaccattaattttaaatcactgtaactagactcagacacatctttattaatcaaaataggaaccactgcaatcaacacatttttgccactgagaaataagtttgtttattcctgtagcctaaaaatctatgcttcaggattcgacaaactcttggaaaatattttctgcatcctgctggttgtggaagcaccttccctgtaaaaagttgtcagatgcttgaagtggtacctggttggcgagaggtcaggtgaacatggcgggtgagacgaaactctgtagtcaaatttgttcagcagcttcagaagttgaatgaattgtttattagaataattaattcttagttattaacaattgcaaaaactataggttaaaaataatctgaattccaaccccaggaatggtagaatttgtaattttatctgcttgtgcacatacttgtaatggagtatcatatactatttattgaaaatcttatttttgattcattttatcaaattaactccctctacccccaaaaacagcgtagtaccacttttgaattagatttgtgatcttacctagcaccttgaatttgtaagaatattaaaagaatagccaggtgtggtggctcacgcctgtaatcccagcactttgggaggccgaggcaggcggatcacgaggtcaggagatccagaccatcctggctaacacggcgaaaccccgtctctactaaaaatacaacaacaacaacaaaaaaaaaaaccgggcatagtggcaggcgcctgtaatcccagctactcgccactgcactccagcctgggcgacagcgagactccatcaaaaaaaaaaaaaaaaaagaatattaaaagaagaatatacgatgactaaggttccttctaggaatgtaaggatgagttaatatttgaaaatttaataatcgtcatttgttagcaggtcaaatgggggaggagaagtcataacacagtgacttttatcaatttaatgataaaataacatactatgatcttttaatatctagctgaaaaattgccagttgtcatgcatcatgaaaactagttaaacatcaaaataggctatcaaattatcccactattaccattattatttaatatagtctaagtaattgttagccaaagtaattacaccaaccccctcccccccacaaaaaaaatcaacataagagatataagtactggtaaagagggttaatgtgttatcatgtacaaatactattatctacctagagagttaattgaaaaactggtagagattaatagggtaactggataaaaaataagtatgtaaactttttaaatgttaataacatttagataacaaagggagagatacgttttattcatagtagtaaaaaaaaaaaactaaagaactctggagagtaaacttaattagacatgtggtatatatagatgaagagggacataatatgtgaataacaaagattatgccatgttcctgggtaagaatgcttctcaaattactcctgaatttcatctaacaccaatcaaaatcctaacttttttttttttttttaatagtatgagcatggtcattgaatgacttctatagttcattgctagaatagctaaaatattttggagaactagaacagaataactggaatttccctaacaattttaataaaaagtatgctggtgttgattcagtattggacaataagtggaaagaataacattcggaaataaacattcagaagataagcccagtatatgtaagaatctaataagataaatatatttcaaattaatagggaaattatagttattctacatttacagaagattttggaagaaggtgctggctatttgttatggggaaaggatggattaattgctaccccatatttaagtatgttcttttttccttttttgtaatggcagtttgtcagtgtgaaataaaatgttcttttttaattaaaatctaaattaaaaattaaacatggagacaaaaggaaaataggctggcatttttacagtgtcagggtgggttagcaaagacatgatatcagaagcagaaaataaagtgatccgtttgactaaatagaaacaaaacatatagcagagacttgtaaataaaattgaaggcaatcagtaaactgggaaaatacatttgtaattttattgacaaggggtcaacattcttactatttaaagagcccttacagatgaagaaaaagaccccaacacctcagtagaatgcaggctgaagaacatgagccagcagttctcacaggactaaatataaactacacatatatagatattcttttgatttaataatcctacatgtagccatttgttctaatagcaaaaaatgaaaaaaaagttggttaaattttgataatactaatgttgtgcagtcattaaacctgaactgtagatttctattcattgtcataaaatgttgaccatgtatttctgagtgaaaatagttactgagtagtttaggtaaggcaagagtcagtgaagcaatgtctcgataaaaatttaccaggatattagcatgcgtttatttgtggatatgattttcaggttgtgtatgtgctgtataaccttggtaattttttgagtaaaggtgaaaaataataataataaaagatggatagatttgaccacataaaatttggaaactatatatgcaggaaaaagagaaaaagtaggcaaatgacttggctttctttggcctgtaaacttcttaagggcagacatcaggtctcttgttgaatacagtatcataataagtactcagtaaatatatgttgaatgaatgccttgtacattgatttgcacgtggcagatttcacctgtatcttataactcctttctacaactaacttcatcacttaacataattgactttgatagttatagtgttggacctagcagtacagagatctgtaagattccattgtttaagacccttgaaatattaaatatataaaagttattccgaatataagccatgaattacatgtttgtttctgttttatacctaggcactttttaaaaggaggaaagaaaatttagtatctggaacaaaaggaagatgtgaatatacttccaatctaggaatattaaaaatcctgagatatcagaaaggaaaaatatgcatcttcaataattttttgcatttattcttccctcttcatctaaacatctcctaccctagtttagtgcctcataattctttgctaactactgtgttaactccagatggtttcccagttactagtctcatactgaccattgcttccagataatcttcctggcccaaaaattttccttgaaggcctggaataaatgtcactccttccatccaccaagccttggggatatactttaacctattgattaagaatatagatagatggagccaggcgcggtggctcacgcctgtaatcccagcactttgggaggccgaggcgggtggatcacgaggtcaagagatcaagaccatcctggccaacatggtgaaaccccgtctctactaaaaatacaaaaaattagccgggtgtggtagcgagcacctgtagtcccagctactcgggaggctgaggcaggagaatggtgtgaacctgggaggcggaccttgcagtgagccgagatcgtgccgctgcactccagcctaggtgacagagcaagagtccgtctcaaaaaaaaaaaaaaagaaaaaaagaatatagatagatggggccaggcgtggtggctcatggctgtaatcccaacactttgggaggctcaggtgggtggatcacttgaggtcaggaattcaaggccaacatggtgaaaccctgtctctactaaaaatacaaaaattaagaatgtagatatatgggagcaagaatacctgttttgtctctctccacacatcaagtttctcacctttaatatggggatgataataatagtgcttgatttatagagttgttaaaattagatatttcacaataaagcacatggcatagtctgtggtatataatcatcatttagaaaatacagcttttttttttttttaactaacacatagcaatatgatcacctttcttgatcatgctaatactaatgtgttcactttttttgttgtgtcgttttgttttgttttgagacagtctcctccctctgtcacccaggctagagtacagtggtgcagtctcaactcgctgcaacctctgcctcctgggttcaagtgattcttgtgcctccacctcctgagtaactggaactgcaggcatgcaccaccactcctgcttaatcttttttgtgtatttagtagagacagggttttgccatattggccaggctggtctcaaactcctggcttaagtgatctgcctgcctcagcctcccaaagtgctgggattataggcatgagccaccacacctggccctgtttctatttcttacaaattttaagcctcttgaaaatagaatgtatgatgaccatttttcccttcatacctagttcagtaatcagtaggtattaaatatatatacttttaactgtaaatgaataaaactgtatttttattctgagaatcaagtgagaaaggtgctttgacctaaatggtcactaaaatatttagtgtagtgacttgctttttaagtggatctaagaagtacagaaaataggattattctagtcaaaaagaatgtgaacctaattttttaatggttgggagaagtttttgtagaaatcatttcatgctttttaggtagaaaaggggctagacatggatcaaggaatcatataagaatagaaagagcttctgaaaagggacacacatatataagagatggtgaaaggaatttggatttagcatcccagtacctttagttggtgatatagcagtttagtagagggtaactgtaacacagtaacaaagacttttcagaaactcaatgtaaaagaaagaactgtagcagtggctcacgcctgtaatcccaacacttggggcgtctaaggcgggcagatcacctgaagtcaggagttgaagaccagcctggcaaacgtggtgaaatgccatctctactaaaaatacaaaaattagccaggtgtagtggtgcatgcctgtaatcccagctactcgggaggctgaggcaggtgaatcacttgaacccgggagacggaggttgcagtgagctaagtaaatgccattgcactccagccttagcgacagagcaaggctctgtctcataaataaataaatgaataaatgaaagaattttatattttgcactggtagaaattaaattagagatcagtcacatttgatttacctggagtttgggagatagaatgttttcagagttattttaagcatggtaattaaagagtttctttgggattttggttggattggaggagataacttaatgggatgaggcagaaaacagttaagagccattgtagattacagattaatggctttactgtagagccttaaattaatctgtggtttcaaactctcatccaagctttgtgtttcacagacttgttgagcccattaaagaaatggaagtctcgctatctgatggagcagaatgtcaccaagttacttcggcctctgtctccagtcacaccaccccctcccaattcaggctcaaagagtccccagctggccacacctggctcatctcacccaggagaagaggagtgtcgaaatggatacagcctcatgttttcaccagtcacatctcttactactgctagtcgctgcaacactcctctacagtttgaggtgatttgggtttggttgctgggagtgctggatatgaaaatcatcatttgtaccttctcatttcaaatataataccattccaaatgtttctttactatctttcttccccatctcagtaagagaatgggaaacctcagggtcattgtggcctgttacctggtagcctctcatcttggcagcccctatgcttcccaaaataggcatactgctaccacaaatcccattcatgtatcttttgcatgcagtccatcaatctccataagtttaggtagtaagcatgctagatctccatcgttatctttactgtatactttggtcaaaataggcctctagctgcctgtagtatctgttagtaacactagcctgagagcacagatgatattgattgattgtgtcttcgtttctaggcctttaaataagtgaagtgtctttcccaggttgtttggtattttcattgtggccttagcagagatttagaaaacattggggtatggcttatggcgaatgtgggttttttccactccaggttactttccctctttgttataatgtcttaggaatcagaagtagacaagaggctagcaacatgtattcatgagacaaatttattaccttcactgttggattaagttagaaatgtctgcctcagctgtttcaaaaagtaatcttgaatcactttagtgttcaggtttgggtgacagcaggtttcaatagaatccatgtatacttttttaaaacacttcatctattgcatgttactttgatttgtaattaaaatggacactgtctcttttttccttctcagaaaaatttgttctgaccactaaacacactctgctgctctgcccccttgtttgcacttctccagatgtgttttttgagaaaggtgaacattttaaccaatcttacgtttcctattcagcttttccaagtatgaggattcagaatacttagcttttatgagtaactaagaggcagctagcaacattgaaagcagaactgtattctttcttaccctagacctctacttttggagcagacctctttctgggtgagggaaaaaacctcctggttacatatcagttatctagggaaattactctttaccagattatttatgaaattctttcagccagataataaagcagctgattcaggcctttctaacttgactttgtctacttgcaattgactttgcagtttgcacctagagctttatagtaaggtatcatgagaggaattctccctggagggcataagattataggaatagagtgtcatactttatcaatacaggttttattataaatgtggaattatgaaaattagaaggaggccgggcgcagtggctcacacctataatcccatcactttgggaggctgaggcaggcggatcacgaggtcagtagatcaagaccatcctggctaacgtggtgaaaccccgtctctactaaaaatacaaaatattagccgggcgtggtagtgggcgcctgtagtcccagctactcgggaggctgaggcaggagaatggcgtgaacccgggaggcggagcttgcagtgagccgagatcgcgccattgcactccagcctgggcaacagagcaagactccgtctcaaaaaaaaaaaaaaaaaaaaaagaaaatcagaaggtaagtcactttgcaaaacaagcgggttcagtactcagtgtgttccttatcccttgtagcatttgggataactattaaacactgcaaatataaagtggttttggttttgttttgttttgttttttttaattggtgatcattttaataatacagtccatgcataatgttagaataccaggagggaaggaaaatattaaatagtaaaaggtccaaggcatggtttcacttgcaatttaaggaaattttacctttctcatcaataatagaacagatttcaccaccctgacccattctaatcaccattttaatggccatactctttgctgtattctagtacagagaggtggggagccttttttgtagcaaaggctgtgacacattgtgaaatatcaaaaaggtgtcacgtataaagaccagcttaggctgggcatggtgg

SEQ ID NO: 366 - DNA, 3563 bp, Homo sapiens
  source 1..3563: mol_type = genomic DNA
agagatgtgtgtggatgcccgtactttcggtaatgatgctcggttcatcagaagatcatgtacaccaaatgcagaggtaagatatctgtagcaacttccctttgactggaaccatcaaatgacaagcttactgaagaagcagtgtgaaaacttcactcagataaaggtctgtagataatagtcgtgatatttcatcgtgggaggtgaaaaacaaaagtaatggtgcttttatacgacaaaatgggcgcaaggaaagagttttctttagagaaggcagaaatagaaaagagcaagttagcatttgctaaggagaaaaagctagactggataagaaaatcaagtgtagttatattaaagagattgccatacggtggaagtagatgttgttaggcctaactaagctatttggttgcagtttttttagattttagtgagtaatgttttatgagaggatctagacatttctagaattcattactcagagcaaccacatcaaataaagcaagaaaatccacagagctttacttactggctaaggaattttaattctctggtggagctggaaacagctataagatgtgaaagcggctgggcgcagtggctcatgcctgtaatcccagcacttcggaaggctgaggtgggcagataacaaggtcaggagttcgagaccagcctggccaacatggtgaaaccccgtctctactaaaaaaaaatagaaaacttagccaggcattgtggcgtgtgcctgtattcccaggtactcaggaggctgagacaggagaattgcttgaacccgggaggcagaggttgccgtgagccgagatcacgccactccactccagcctgagcgacagagcaagactgtatctcaaaaaaaagatgtgaaagtagagattttaccctgatttctaacatctcaaggtttctccacatatttaagaaagtattataaattttcaagccagtgcagtataatagtttcagatgaaatgaaggggttaaataacagattaccataactccttaaataaataatagattaccataactccaaatggagagaaagtatggtttttttctctcttacggaaagttcatggtctttatgaaaaatccaaccagaagccttttcacacaggtgcgacacatgattgcagatgggatgattcacctgtgcatctatgctgtgtctgccatcaccaaggatgctgaggtcaccatagcatttgattatgagtatagtaactggtaagacctcagaaacctttcctaacaggaatatccatgtcttacatattaagctattcactctatttaaagtctgctcttgtttcttgccttttcctttgtttacttaatcttttcatgactaatgaattttctgcctagaaattgtaaaggaaaagacaggcaagattttttttagagatacggataccttgtatgatactgctcacaaatttcctgacagaagtgttttcgcttatgcctttttagcaagaatagcaaaatggatatatatgtatgtatgagacactcctggaaattacaatagcatcctgttgttatgcacagagtacttatgtcagggaccatatagaatgagaatttaggccaggcgcagtggctcacaggcctgtaatctcaacactttggaaggctgaggcgggcggatcacgaggtcaggagatcgagaccatcctggccaatgatgaaaccctgtctctactaaaaacacaaaaattagctgggcgtggcggcacacgcctgtagtcccagccacttgagaggctgaggcaggagaatcactcgaacctgagaggctgaggctgcagtaagccaagatcacgccactgcactccagcctggcaacagagggagactctgtcttaaaaaaaaagagagagaatttaatatgttacctctacttttaatttgtcaattatacccttataaagctaggggtgagatttaaagatccaccctgtccacagaaaccatgttatctagctgtatatgacagtgcagaaaaccataaagggcaattcatagatgaatatgtgggattttttaaagtatatgctttttgttctttggtcatttggggcaaaatagaggttatgtggtaaagtgatgtttggcccaggtataaggaaaaaagatgttctgcttaattcatcaaggaaaataaaaaaggttttaagaaggttataaaaggttttaagaagtagggaattagtaggtaaaagtgaggacatggtaatcgtgggcacaagatgagtatggccacatcagactttatcattgataaactgcctgctaaatagccaataaaccactggggggattgaatttagggagggctttcttttttttttcccactgaccatggagtagaattggggttacacaaagaaagacagaatattgaaagtgttacgtcaggcgcggtgactgacgcctgtaatcccagcactttgggaggctaaggctggaggatcacttgagcccaggagttcaagaccagcctagacaacatggcaaaaccccgtctctgccgaaaataaaaaaattagctgggcgtgtagtcccagctactcaggaggctgaggtaggaggatcacttgagcccaggaaacagagattaccgagagctgtgatgcaccactgcactccagcctagatgacagagcgagattccgtctccaataaaaagaaaaacaaaagtatttataggactctctaatgtctctgtttaacttattcagagacaatatcagaggaagttactgtactgatattttaagagggtgaatggataatgtaactgaatttcaagggtactgagacaggcattttggttgtttctttggagcagtaattataaagtggactgtgcctgtcacaagggaaaccggaattgtcctatacaaaaaaggaatcctaatgctacagaactgccactcctaccacctcctccaagcctacccaccattggagcagagactagacgtagaaaagcacgacggaaagagctagagatggagcagcagaatgaggcttcagaggagaataatgaccagcaatcacaagaagttccagaaaaagtaactgtatccagtgatcatgaggtaatcgcccctggtcaaatgatgatgctatggcatcaatcctccaaaggaagaggaacccgggttgccgcatggtttaagtaggggagctatagtaacacttagtgccctttatatcaatgtgggtttattgtgttcatacatttctttctgttttacaaagtcaaaaacatcctttgctggttttgcaccagagaataggggttagttatcatctgtgtttaccatgtggcctcacatgagttaacagtttaaagcactagagattgttatagagagttttaagctaccagaataaaacagattgattttttctcagagcttgagtacagctgaatattgcctctatcttaaaggaagtagacaatccagaagaaaaaccagaagaagagaaagaagaggttatagatgaccaggagaacctagctcata

SEQ ID NO: 367 - DNA, 32765 bp, Homo sapiens
  source 1..32765: mol_type = genomic DNA
gcgttgggcctaactcgagtcctgccgcctcccgggagtgccgtgcgccgcagcccgggcccaggccccggcagcgcctgggacaaggtaagggtccgacagaaaagagaccgaacctcacgatcgggccccaggggagggaagggtcacctcctccgtctccccgcgctcgctctccttgggtcgtgggcctggccctccccaagctcttaggaggatgctgccacttctcacccccctcgccgccttgcacacaccgttgcaacaccccattttcccagggagagagatccccctctaatctaggcgacccaactccccctttcatgtttttcctgggtcaggacgcttcccctcccccaacgcctcttcaccccctttcctgggaactgcctactccacgtttacctttcccttgaggagaggcctcttgctgccctccgctcgaaatacacaggcatactttttttctctccccgatcccccactccctacccccgttctcgcggccttgtgacagacaactctgatcgctctgggggccgcgatctcccctccgtaatcttcctggacgccttccctctcgttttctggcttcccacctcagatggctgcttcccaaaggcattaccttcgccacccccaccacacgttctctggctccccgtggcgtgtgccacagcgtgtctgagatagcctcgttgaatgtgtagggttcgagcctggagttgagccagattgtgtcgttttacttgccttgggcgtggagaacgatcttgtgagaatatcttcaaaggcagaaaaatattccctttatgaattctctttccctctgcgtgtaagtcgggaatgtgaagaggagtgtaggaaagagccctggttcaagtaggtaaatcgcatgagagggaaagttaaactgttgggaaagccccttctatgctaattgattctatagagtccttgcttgtctcacttcttgggcgtcagtggtctttctcttggatatggatgctgcagtcagctctgctggtctgggtcaggggtgcgtgtatgacctgcattttctgctttctcatgttacttgtgcaatgtattcaccggtaactcatttctttcccagacctctgggttccactgggctttgtctatatttaagttcatttctccagtttccttcctgcacataggtactgaacgaatccccaagttctgtgctaattaccttcatcagttgactaaacaagtttttagatgacatatttgtgaccaaggtcatatttacatttctttgttggacagatgttacatagctatacttgtgattggggaggatccagctgagtggagtgtgctgagctttttaggagagtgtgtactccctatttgaaattattttttggttgttaattttatattattaatgtttttaggtcacagaaagttctaagtggtaattttagatgtgtgggatctgagctaggactaaagcagagaatacccacgtaatcagaggtttctgggctccatagaggacgtagggcttttttttttctattggatttcttccagttttctcaggatcattagttctcttctgtagccaaaaattctggcctgttatgggattagagtctttaaggtttactcagactgtcattatgtgtagaaaaatgaattatgccctttggtaggacatgacacaaggctctgtttctagctgcaaatttaaattagattgtagagtgcttgggaaattggctttcaaaagaccaaagcttaatcttcactcctaaactgctggcttaattaaaatggatatttagaatttggtaaatgttgatttttctaataaaaggccttggtttaaaagggtgaccttaggattgtttctttcttaaaagcataattccagcccttctggcatggagcactggtccaaaaaaaaaaaaaaaaagtgtgtgtaaggagtgggggtggggtaaagagaaggttgttcctttgggttggatcacaggggtgagtatacaaggcagcagcagctgctggctctggagctctggttgctacgtgagaagcttgagtagtgctggctgctgtctccagggaaggacagcagtgcagcgtccattaatgctgctggctgcagggagcagcacttaggcgatggctgcttcaggactaagaagaaaccttgcttttctgggaattttcactgctgagctggtttgctttttattggtggggagatgggaattagtaattcataatctcctacccatttatggatattggcatctggaaactggatcatggttaaagcctttctttttttgtttgtttgatttgatttttgttttttggcagatttttgttttttatctagacatttgtgcttggataggactaaaagttccattagagttttaatttttcaatcagtttaaaaacccaagtaataattttaagaatctttctgataaccacaataggaagaaaataacaggaattttttcctgcagctcacatatcatgccttcctccatctctttaatcatagaatcaattcttattattttgttatgtgtctccatcctttcgattagaccacatttaccttatagacgatttgctaaacattttactaagcttgaactcttaaactctaaaaaggtgccattttggagtggtttctaaataaatatttttaatttgtatattagtaataaacttctccagattagatattttctttggagtttgacttataagattgattcattatatacatgttggatatagccttctgacatcacaaatatatgtctttggccataatccatctgaaatgtaggacagaccagaagaaatatgcagaaatcgaataagtctagttcaggatactgagaagatggcctctgagccccttaggtgatctcccctcccccacaactcctgaacattaggatgatctctgattaagcaaaacagtctgagcgtggaaaaacttgaaggagaaccaccaccaccaattatatgcaatactggacatattcctgtgtgctgtttttcttccccaagactcgtgtatcctatacttttttctctcagaattttgatttgttcattttcgtgtaaatgtacttaaatctcacaaacatctataatttgtagtatcactctggcatttgtggcagagaaccaaaaagaatggaaatgagttttgtcattcacaaatgtggctcacattgttttcccagtaataaaagcagaccaatgaaacagaacctttaatggatactattttaggaggttccaattcttattactatcacatagataagatgcaatagcagataaatatgatttcatgtatactggctgtttgacatacttagggtttaagataaaaatgtttgtagttttttactctgtggcttaagttgctatataaaataattgcttttacactcgaatttcctgttgtttggaaccttttgtgctcttgatattatcattttttagaggatcatacaggcccttttcatagaaggatttacttaagttatacccttgaaaacttttttatatcttttgatactgttttgtgtccaggaactgactttctgaaattattctggcttttctggggagaatgactatttcatttttacctttgaatggggaaataataaagtgcaaagtacagatttgcagataattacttttgctttatcctctccatgttgaaataacttatgaaaaattaggccatagttaacagcagtcaatgactattggatacattttatcagaggggaactggatcatgaataaaataaaattttaaaaataatttttggctgaactctggtgattcatcagtttaatttgaagtcagaaggtctagcagtgaattttatttataaaaattgtatttcaagtgttgaaaactgaaacttcttgaccagtatattttgtttgaggcatcaaactttgcaaaatgtgcatcgtatatttagtgatataactggtagtcatttgtaatttaaagtattctttcaaaggcactctttagaaagtaatgtagtgtacccgtgatgggcagggattggtaccattccttactgccaaaaattccaaaatatgtggcaaaatgattgatttatcttgtgggtgggattctgggaagttcatgaaaggtggagagaatatagtttccttcacttgtctatatacattttgttaaataagtcttaggaaaactgttttattgtatctttaattatgaattgcgtaaaagatacccagtaactttggggggaggtgctgttagaaagcattacattggagagaattcccctaccctgggacaaaatgcattctgtctttaatacttagcgaagggaactatgggataaaataaacaatgaaggtaagctcagtctgctttatatgtgccctcactgagcaaggaatttgtaatcgcatcgtgcctcattcgtttataccatcatattgattttgtttgctgagtacctgagggaataccttacttaatgtaaggtcacattaagtatgtttgatatgaagacagggaaaggaattttctgcttcttggagtaatgtcttagtatttttaaaacacttaagtttttacatcaggccagttttgcctgatgctcatgtctgttgctttggttgggctgctgctttctcttctgtgttcttatgggttcgttgtggtataaggattcccacagctttcatggcagtatgaagtaatgagaagcattgccttagccatgttagttacatgtatacttttggcctatgttatgaatcacaaaaagcggtagctataggaatgtatacaaaatagatttctgtctggggaatcaagtttttgatttgtgctacctaatggaggggaaaatgctgaatttcttgctgctctgtttgagaaatagatggaagcatgggaggagccagagacctctgcagcaggatttggtctaagtagaaaaggaagatttttgtttcaaattgccagctgcttatgtcagactgactcccttattatgcctccagtaggcctgtcaatatggccaaacagctagataagtgcggggcaggacaaagggctctttgcacagcagggaggcaatgttggtgggggaggggcaggaggtaggaaaggcaagaggaggaggttcttttccctgggagattattcagtttggcatacaattaaagaaatcatttttagttcccactcaagcattgaatttttgccaaccacatactattaaccccaaatttgatacatttcagaatatcttgtagggatccattctcgccaaggaaaaataaaaaaataaataaagctctgtataggttaaaataaaataaatcccacactctgcaccctcctaggtgcaagtcacctcccgaggagacccgttctagagctgaattctcattaagaaatggaaaagaatactctatctgaataaaaacacattgtaatacaatgtgtttatttgggttgggattggacctgaacatgtagaataatttgtttccctttatgaaatagttgctcgtagttgtctacaattttatttcattaagataggtagcacattacagctttcatgtgttgggttgccatatgtaaaatgctaactgaagaaaggctactttttaatttcagcctcatccttagttcctggagaacctgatatttcctggagattactccctcccccaccttttagtttaggcaacctcttttgatacatttgtgttcagctcgcatacaagtgggatagttgcatccagtttattaagacttagtatgaatcatagagttggaaaagatctgttggttatctggtcctttaaaccaaaatcataatgaaatattttgaaatttgggtccctattgaagttttcattaaaatgttaaaggatcggtgttctgaacaacatttttagttacttttaaaataaatgttttgcgtcagttctttttttaaaaataaagaatttcatttataggcaaattagctggcaattatttgaattgtgataggatttctcttttatgaaggaatatatgacaaggtttttcaaaatgcttaatatattttaaaagactttaatttttagaaataattggtttgaacagttttccaagagcacatttgttgcttgggttgaggtaccacctatattgcaatgttactaaactagccttaaagttttcccttctgtctatactgcatgcaacaataaagggaactggaatgttaatttccatttatggattagcagaggagatgttttaaccgattaataaccaaaaaactgcctttcgtacacgtaatattaagcaagcctgaccaagttttgtgttatttctctctgttaaagaaaactggatgtgttactacttaacattatattgttatttaatggtcttggcagtaatgatataatatttcgaccaaaagaaattttgagtaattaattattattgtaattagttggaagtttctcatcagtaaaatagcaacagcattaacacaaaatctagtgagctatattttatattactacagaaatttagggtagtcatttctttctttataatttattcacatggattatttccataaatttgtgggactaaaatagaagccatctagtcaagcaccagtctccataccagacagttttctctgcatgtgctatgacccacattgccagtattaaacatcctttacaccctcccccttcccagataattagaaatctcttcagggtagcttccattgctcctattacctggatcttgctagaggctctaagaagttcctggtaaaagtgagacagtaagggaccacattttgattccaaaggttttgataactgttagggctccccaaacagctaatctcattttcaccaagacttagccagcagagggctggaatggaggtgaaacacaagcactgtacctcatcttgcctgtgcagctgctccaccttatttcctgctattattatctcacaacgcctcctcccatcaaaaagaaactaggacaaagggggaaaattggatgggctaatgtgatttttattatgctaggttgtgggcttgtttatatgtacttaaatacaaagctaatttgccccattcttaaaagtctttagtgatagagattttgtaacttctgtatcttctactttctttcttgataaaccatttcagattctcagccttacagaaagaaaggttttaagcatacttaattttcgttggccgttcacagtcattattaccaccagatgccactgtattattagcttgaagaaaggtgggctctcttctgtacataatatctgcaatttgttttggaaaatactaatttgtataaatctgatttatgactaaaataaggttaaaaattagacctctatgtatgtttaccctattaccttagtgggggtgaaattaattagctctttgaacataaatttttcatgtcttagagttcttttttcaagctgcataatttatgttcttcaagccatttttatcccataccacccccacaaagggggaaattttattttttatcatttttattgtctttcaatggtgagattttcgccaccccactcctgaaatgtgaagactcaaataaaactgagtaatctaataaggtatatgcgttgctgaatgtagtaagatgattgtttcatcattcttagatattatgatctagtttgaatctggtttccagtatcatgttagcatatttaatactgttgatatgttaattttaatacatgcccaggtggatctccttgctttctatttgtgccccttgtttgtcgttttgtatgaagggggtttttgttgttggattttcttccccatctctgtgtcctgttatgttctttggcttatgtttcaaaaattctgtttcctaccaccaacctctgtacatgccacaacacatacaatttgtactttcacagtttctgtgaagtaggatgatctgcagttaataatcaactgtttgggcattcttggtatccaaggaaggttttacttagaaggaagaacctggaaggacctgttggcaattagactacttctgcgtttattttacattttcccttattaacgtaggctgttgagagttgacttgttttataagagaaaccagattgacagagaagacccccaatcagatagagttattttaaaaataaatgtgtttattatggtaacatttggggtagaatctaaagggcatatttttaaaaaaacttttagttctaaagacaaaagagtttaacctaaaacagaacaaagagaagggcctttgaagcagtatgattgattatatgctgaatgtagcattagaatgttgtatgaaagcataaatttttattttctcaatttctatggtacaaactactatgcccatggaagtatgtgtttatgcccacagcctgaaatatattcggtggaatgccttaaaaaagaataaatctggccgggcgcggtggctcacgcctgtaatcccagctacttgggaggctgaggcaggagaatggcgtgaacccgggaggcggagcctgcagtgagccgagatcccgccactgcactccagcctgggcgacagagcgagactctgtctcaaaaaaaaaaaaaagaatagatctgaggaaaatgtaagagcaagtctaaaattttgaagtcctttttgaaatgctattttttcctagacaaatttagtgttatttgtggcaaatagaactttaatgtcgtaatttagtaatagaacaaaataagggtgggtttacatgtccctgcacattttaggatggagctaaaaattataatgtctgcataccaaattgttacacattttaatattggggcttttattgaaaaagtttacccaatatttagaaacctttaaaaacaaagtgacataaaatattcacagataaatcaggtagtcaccttattggtggcatattatgtaagtgtactaaagccagatatttagtgttaatccaaaaatatgaaaattatgctaacatcatatacagatctcagaagttgctgtagccagccaggcgtggcggctcacacttgtaatcccagcactttgtgaggccaaggcgggtggatcaccttaggtcaggtgtttgagaccagcctgaccaacatggtgaaatgccatttctactaaaaatacaaaaattacccgggcatggtggtgcgagcttgtaatcccagctacttgggaggctgaggcataagaattgcttgaccctgggaggcagaggttgcagtgagccaagatcgtgccactgcattccagcctgggagacagagcaagactgtgtctcaaataaataaaaaataaagaagttactgtagatgccactcttacttaaaccctaggccatgtgtggagtcccaggggaagacatgtatttttagagaaggaaggctctaggtaggtgtaaccttcctcttacagtttatcatgaacagttagtatgaaaaggaatggctggaagtttgcagtagtacaccgagcaacaagagaaataaacatatcccacttcatgaaatgactatgccagccaagggagatgaaaaacaattttttttatagtacacctcatttttttaaaaacactttaatactaggaatatgtttctgtggcaaatagttacccccaaaggattatgtcaaatatctcttgtgaaaattaattttaaaattaatcttttggctgggtgcggtggctcatgcctgtaaacccaacactttgggatgccaaggtgggcagatcacctgaggtctggagttcgagagcagcctgaccaacatggagaaaccccatctctactgaaaatagaaaattagctgggcgtggtggcgcatgcctataatcccagctactcgggaggctgaggcaggagaatcgctcgaacccaggtggcagaaattgcagtgagctgagattgcgccattgtattccagcctgggcaacaagagcaaaactatgtctcaaaaaaaaaaaattaatcttgtgtagatagtgaccacgttttactttccttgggacagtcctggtttatacctgctatcctagcgtaattagtaatagcacccgtttcactctcaaaaatgtctcaatttggatcataaattatacgcttaccataattgtagaggattgtgagacttttagtcgctacctagcaacctagtttttcttgatagagctcttcttattctggagtctcctgtgctgcgatttatctgttgacctctctgaacccccatttccaaatgagcagtttttcgaatgtcttttttcttttcccattaggtggtagtaagggaaggagtaggtatagatttgattaattttttaattttttattattaaaaactccaattactacaaaatagaaaaatactttggagtttattaaactgttagtttaaaaggttccatttgatcaggataaggtccataccttgattggtaagtttgagtctttatagattctgttttttccatgtaggattcttgttaaagaaattcattattttgtggagttcgtactctggattttgaaggttggataatcatttaacacattcctctattaaacaacctccccccacctgtatttcatgtaaattactgcttagatagattgtaagcatattttataatagtactgtgtatttccattaagagttacataatttctgcttgtctgtgtaatgttaagcagctgttgttattcattgcctagatcaaactttgtggtcttaaaaattgaagacctggaagagcttttgtttgtgtgaattatgtcaagatttaccatattagaaactaaaactgagaaaaattttaagttatttattaatattaaaataacagtaataaagcctgctaatacaagtaatgtgattttttaataaaaataacatttttaattttataagtgtcgtttgacatttttgcaaatctctttaatgtctgacttaatagaagacagctgctttctcataactccttctgcatttaatttcttgtgataagttgttttggttgaagactgaagaaaatctggccttgtacagataattggttggaaaatggaagacctcatataaccctctgacagaatctagaggacttcaggcattctcacaccaccctttttgagaatcactggcctatattcatgatttacttcatattagatgatattttcttacttcttcatttattgtccggaatactcacccttatttttatttggctatactaagatagtttatatacagaaggtaagataagcacttgggttttttacccccttatttactagttttcaaaataatgggttggtaacttagcaacatctaaagacgtgaatgaagtattattattgtgtactcatggttttaaacatgtttgatatgttacagtctctggcagttactatttttgacattcaggttgtcctacctttgtctgttggctactaaattcttttgattcattcttaatactttcctcacttgtttccttgcttcctactattactagatgttctaggataattttgtacattttttgccccaaacctggaatcagccatttctgcagaaacctcttcattcttttaatgaaaaatggtacttagaaaccacagtatggatggtaggagtgttcattgctcttggtttgggccttgtttctagatttttcaatgaacaaagtttaaaagtattttatttctttttaaaaatatcacttggtattttaaaagctgcatttcaaactcagtgctacatgatgtttacgtaaacctaatctttctccctttccccatgcccaaaatctcagttttcactaacaccaatgtaatttctctttgttttgtgccacaatacacacactacagttttagtgtgacagaacaatatgattactggaaagtggctttttgttttgttttctcatgtctttttgcccttagggtatatccctttagagatagagatagtcatgcctcacttgatgaggatattttctgagaaatgtgttgtcaggtgatttcgtcattgtgtgaacatctagaatgtactaacataaacctagatggtacacctaagctatatggtatagcccattgctcttaggctacaaatctgtgcagcatgtgaccactggatactatacgcagttgtaacacagtggtaagcatttgtgtatctgaaaatggaaaagataaagtaaacatacggtataaaagataaaaaatggtacacctttgtagggcagctccattacagtcttatgggatcattatcatatgtggtccatccttgactgaaatgtcgttatgtggcacatgaccatatatagtcagattacagtattttgaaatcccccttagaatagttctctatggttgtgccaccagtttgatacacagtgaggttaatttgttacattttactttcagatttttcagggattaggttttgttttatgattatgtaaaatacttaaatggttaataagtgaaatttacgaagctgggtataatcagaaaaattgagcttctatcctagtgtcttccagctggttctctccctgtccctgtatgttagactcaacagagtcatcatgaattttcagagtgatgttttgtcgatacttccccttttagcagaagaagcatttaggttagttcatttactaaaactatttccttctagatttttcactaactaatatttttacactgtagaagaggaatgtggaaatttctgttctttcttttttggaaccagaatttcttggcttaatacaagcagtttgagataagaaactttctccagtaaaaattctctttttttttttcttttttttcttttttttgagatggagtctcgctctgtttcgcaggctggagtgcagtggcatgatctcagctcactgcaacctaggcgtcccaggttgaagcaattctcctgtctcagcctcccaagtagctgggactacaggtgcctgccaccacgcccagctaatttttatatttttagtagagacagggtttcaccttgttgttcaggctggtcttgaactcctaacttcaggtgagccaccgcacctggccaaaattctctctcttgaaatgccagaccatgtttgtctctgggaatttcaggtacacttgggacactggtgctacttgaagtgtagagagctcatcagttaacatttcttgaatggtttgcccttagacctgaaatgtatgttatttagaaaggatgtcatatattttttaactttgtcatttaaaatccaagttatttgattttatgtgttttaaataaaatattaaaactttaaaagtcttgtacctgttaaatgttttatccttcctaattacagtatcttaaagttatcacatttcagcaatacgtcactttctaatgactaatatagtctttaaaaatactaaatcaagatataccaaaggtgaagaaatagtgattaagaatgtgaggattctagctgtggttttcttgctttggctttggccaagatgagtttaattctttggtctaataggaataatacttttctcctaaacattatgagcattatttgagttaatgcatgaaaagtggttaaaggaacagtggctggtgcaacataagcatccagtaaatgctgcctttattttggaagtggttattgttacgagtatttgatcagttctctaaactctgtctgaactttacttagaattagtaatgttcatatgctgtaaataacacctgattttcaatacttcattggttatatgaaaagaaccaactgttaacaaaggaataattggtatctagttaaaatttgaggcctctgacttcacaagtataccagtgcttactatataaatataatcacatttaaaaatttaataaagaaagttttaaggaagtaagtctccttttcaggatccagggtcctttacaaacactggatcctgaaattgtattatttgttgtggctttagggtattgtgtatgctgaccagagtcacaggtggtttttttgtttgtttaacactagaattttgagatacatttgtctttacatgccctcaaagtaagttatataacaccagattgttcattagttcaggtttgatttttttgttgttgttttttgtttttctttttaatactctggggttggagtgaggttgtagagtgctataaggaattcctattagaagatagtattttagatatgggcattctaggaaaggacaaaatggtacactaaagttatcttcccttttcccccaccaccaaaaaaataaggagcaaactacagtgcacagttttgggttttttttttttttttttttttttttttttaaagagacaaggtcctactctgtcgcccaggctagagtgcagtagcacaatcattgttcattgtaaccttgaaccactgggctcaagcagtcctcccacctcaacctccagtgtagctaggactacaggtatgtgctaccacacccagctaattttttaaaaaatatcttgtacaggtgggggtctcactgtgttgcccaggctggtcttgattgaactcctggcctcaagtggtctcatacctcagcctcccaaagctctgggtttacaggcataagccatcaggcccagcccacattttgttttttaaacaagtctttatcttttggagatacatgctgaaatatttatggatgaaatgaaatgttatctggggtttgctttagatagagaggagataatagatgaaacaatcaacttattagttggtcattgtcgatactagataatgaataaatggacttctttataccattttactttcatactttatttgaaacaaggtcttgctatgttgcccagctggccttgaactcctggcctcaagagattctcatgcctcagcctcccagagctttgggattacaggcatgaaccaccatgcccagcccataatagaaagttttaaattttaaaataaaagtattcatagacttggctatcatggatcctggtaaagtagactagtgaacataatcagatgtttcagtctttccctgttgatactgcttgccctctgagcccatttcctctcctgatcatcgcctgctatttccaatcaacagaaaaaatagagtagcctacatatataatgagtttatactaagagggaaattttaatattataaagaagtctatacagattctggagagcattcctgaagagaagattgaggaagcaaatggattaattaatgtaatagtgtgttcagtgtgcaataggtaacattttatgatatggttgaatttctgaaaaggtatcttataaatatcagaccatatttaaggagacttccacctctactgataaaatctgcccttctctctccccctgactttattgctgcccatctgtagttttgatcttttttctctaggattctttgcctagaattgccatgggccttctggatctggaacacggatgaaggaagaggatgaatgtttttcagatgttatcccttatgggagtaatttgtaaattctagcttcttcgggtggggggaggcggggtgtgtgtgtgtgtgtgtgtgtgtgtgtgtgtgtgtattatttatttatttttttaagttaattggcctcttccagcaaagagtatacagcagagacctagaagtttcattttttgtttgtttttgttttgttttgttttgtttttgagacggagtctggctctgtcacccaggctggagtgcaatggtgtgatctcttctcactgcaacctctgcctcccgggttcaagcaattttcctacctcagcctcccaagtagctgggactgcaggcgcgcgccaccacgcccagctaatttttgtatttttagtagagatggggtttcaccattttggccaggatggtttccaactcttgacctcgtgatctgccaccttggcctcccaaagtgctggaattacaggtgtgagccacggctcctggccaagacctagaagttttacgtcaaattttgtctctgcagttttctgaggaatgagtatatgtgctcaaataatagctaagtattaagtctgaaatattctagaaaaacagtcacaaagtagttatgcctaggatgtttttgaatattggtactagaacaaatggattcctactagatttcctttttactttcatattcagatgtaggaagagttggaattcaaaatgtgaaaagcagtcttgaatctcagtaaattcttaagaaattcttaattcattgaagagccattggtcgtgtgtgttttttggggagtgtgtgtgtgtgttgttgttgttaagaattcggggatgagtatgaggctatcattgcttctacaaggcaacttaatgatagtttgctgcttggcacaacaggtgaaagggcctttctagagcagggatcttggtttccctttttcccacctagtagtatcattccatgtatttaccaggatatacattgtttagtcctgtcttggctaaataggtaatggtccttaaggacataaaatggaaggatattgtgcagaagaattactagttctccgtagtgtatttttttactgtattctcctcatcaacagatggaaaatttttaaacttagaagaaaaaacaagtgtttttctccaaaagattgagaaccactgcttttaagttattaatggaggtcttcaatggatttgttaaaaatctggagcatggattttttttttttaatttttttgttattggttactgagtattggaaaaggaaatacagtattcaaaaacagtaatgttcaggatttggaactattttactcaggaaaaaataagtttataaatagacattttaatgaaaaggaaaatagcaaatttatggaaatctgagatagtctgtgttttgcttcactctgtttagtgctagaattctggactttgtttggggtcaaactctgatatgacaggaaaactaacagatgattaaaagagacagtaacataaatgggaaagtttaaatatggtatatggttttaattatattttgtataagaaagcagtttataccagttgtattcctaactaaaaagtactattttatcagtttcctgggactaatttattataagttaattaatgacatgagcattttggcccaaatacagttgaaatgttcattgaaactggatcaaagatgagcatatgtgtcaaggctttaaaatcatttttcatattaagatttccagagaaagtttttgtaatatataagttaaatatttttaatgctttagatgacaggaactgttgaaggtcctggatctcataacaagccactagctagctgatccaaagacatttggccccatgggcttctaggaagacaaatgtgcttaccatttcaaagattttattttgctcagtaacctactagacatatattagtgtttgtttgagttggtcgttgtcttccattgctgttattttattattattatttttttaattttagagacaggatctccttgtcacccaggctggagtgcagtggcacagtcatagctcactgcagtctcaactcttaattaggctcaagggatcgggatcctcccacctcagcctcttaaatagcttggactacaggtatgcaccaccactcctggctgtcttattgtgttgcccagggtggcctcaaaactcctggcctcaagtgattctcctaagtcagcctcccaaagcgctaggatacaggtgtgagccaccctgcccagccccattgctgttgaacttttttttttttttaaagacaggctctggttctgttgcccaggctggagtgcagcagcgcaatctcagttcactgcaagccacccaccgagctcaagccatcctcccacctcagcctcctgagtagctgggactataggtgtgcaccaccatgcctggctactttctttgtaatttttttgtggttcaaataggaatcttccacgtgcatccaaaatatttttggtttgtgacactcagtgttattattgactcatttttccattggaaggtgtgcctcagagtgggtgagcctttttgccctcagtcttctgtcagcactctaagactccaagtactctaagagattgctcactaaaaataagaacagctggccatctacctcaaatgtgagccgtcacttttgtgatataatcagtccttatctttagtacacagatttatggaatatcacactcactgtctgcctgctttggggtgtttctcctgtgtcattcatttttgtatattggcatatagcaaatataggaatgctgtgtcgcagctgtgggtcatgtatgtacttgcagttagctcttgctcccaagaatgcaagaaatttatcaacaaactcgtgtcataaaaatagtttacagtgatttttttcttaaaatatttcaatgattaagactttttttaataaccacaagtgtataattgtaaaacctaagcattactcagcaaatctagcaattgttgaattgcataagcttcttgttcattggaacttttgctaaagaattatgacctttgatttcttatcaccatgacctatcattatgataaacatgcccctcttatgtatccttatacccattataaggataaacaagggatagctccacccaccagatgtcatagacacaactggtattttggggattttgctgtagactaatcctggaaggaagagaggttatagataaaataagattggccatgaattgattgttgattaaagctgggtagggaacattgggttttctctggttttatatttatttgaagtttttcaccataaagttttttttttttaagataaaaaataaaagcatgaatagtgtaaacaaagttttgaaggagaaggaaacaggttagtagctaattaacaaaaatgttcttgttccattcaggcacaggagtttggactagcccaataagcattaaggaaaccattatttgtagatttcagataatgcaatgatagtaaccaaagttatgctctagaagggataacatcatggaagaatatagagtagattggagggttcacaccccagaggtagtgagaccagttcactgctattatataatgctaccttgaaatcatagggaggcgactgatgtggtttgctaaaagtctccaaaaatttcaaaggagaatagctcttcagtcaggtgctagtgccagcacaacaaaaaagagggttttttccctcatttggccagggcatggatttggaccatgtgggtgtcataatggagtataccaagtgattttgttcctatgatgaaagtgaagtccatattttgtctcctgtcttttagtaaatcagtatagataagtcttttttttttttttccccccgagacggagtctcgctctatcgcccaggctggagtgcagtggcgtgatctccactcactgcgagctccgcctcccgggttcacgccattctcctgcctcagcctcccaagtagctgagactacaggcgcccaccaccatgcccagctaatttttcgtatttttagtagagacggggtttcaccatgttagccaggatggtctcgatctcctgacctcgtgatccgcccgcctcggcctcccaaagtgctgggattataggcgggatccactgcgcctggccaagtctttttttttttttaattattttattctttatttttttccccacatattctaaaataagtctcttacagtgtctaggtttctttccaaaggtgattaaaaatgaagcatcatattttaaacttctgaggcagaactgctagaacaagagttttgttttttttttttttttgagacggagtcttgctctgtcgcacaggctggagtgcagtggcgcgatctcggctcactgcaggctccgcctcccgggttcacgccattctcctgcctcagcctcccgaatagctgggactacaggcgcctgccaccgctcccggctaattttttttttttttgtatttttagtagagacggagtttcaccgtgttagccacgatggtctcgatctcctgaccttgtgatcctcccgcctcggcttcccaaagtgctagaacagagttttgataatttgtttgaaacgaagcactcaaatcttctagtttatttgcatttgcagtcagacctctacagatgccagctagattacagatggctagcataagtttttttcattacagaaagaagaaatttagagcttagtgcggtctattaaaagaattaaaggttatgtcaaaggacaactataagaaagtactttggttctgaatattgcttcagctagggtttattttgaagctcctagcccaaatttgtagaaatgcaactaagatctaatatttagtgtgtaagaactttacaggacatccagtcagtagtagtcttaaaagtgaatcacataggctgaagcaggcagatcacctgagcccaggagttcaagaccaccctggccaacatggtgaaaccccgtctctactaaaaatacaataatcagctgggtgtggtggtgggcacctataatcccagctactcaggaggctgagacaagagaattgcttgaacccgggaggtggaggttgcagtgagctgagatcctgccattgcactccagcctgagcaacaagagcgaaactccgtctcaaaaaaaaaaaaatgtgaatcacatacataaacattgggaatttgcagataactttcattttagggtttctagagcgcagtggtgtaatcttggctcactgcaacctccacctcctggattcaagcgattctcctgcctcagcctcccaagtagctgggattacaggtgtccaccactatgcctggctgatttttgtatttttagtagagacggggtttcatcatcttggccaggctggtctcaaactcctgacctcaggtgatccacccgccttggcctcccaaagtgctgggattgcaggcatgagccaccacacccggcccacttacaggatttttctcccccttcatggttgtataaatgcagtacttggcacataggcaaacctgaacagtttgcaagttgcctacccttttctactttggataaaataaacctcttaaaatagcacttaacatagtaatatatgtatattaatagtagttacttcatgtttgttgaatgaatgaatgaaaaaagtagcaaatctacataatataaatcccaagacagccaggaattttatctggacctaattgtcttacatagcaccaattggtacttaataaaaacaaggctgggcatggcagtatgcgtctgtggtcccagctacttgggaggctaaggtgagaggatcgcttgagcccaggaggttgaggttgcggtgagctgtgattgcaccaaagcactccaacctgagtgacagaccctgtctcaaaaataaaaataaaaacaattagttataactcagatgttgctatctaaggtaagtagtaattactataataaacaagctatatattaacatcttaattttctttcctctgaactttactactgtaggtgtgtagtgaacttcatacaagttaatctttttgtagctctatttcttcatttctgtttgttcatcggttggagaaattttgcttaaattaatgaaagtaaaaatacagatattaatggctcataaatgtgcacaacccacttcatctatagtaagtaaaagtggctcccattttggggtttgaaaatgaagaagatctgaattcacagagaggaggcacgtgtagagatatgagaagttcttttcctactctactttggtacattggtctctaacacatgttctgagcctcagaacacagtagaacagaaccttcagaaagtgttgagagtataactctttaaagaggtttagtcagtctaaattatttgagggcatcatctttatttggtacttagaagtctaaaatcttcctgattgttgttaaggttacaaagagtctgtgtattgttggttagttgagcagtaaatacctttttatcattgttaaatgggttgtaaataaaatatttttcttcagtgttaaaataatttatgatcacaatatttagataataataataataattctgttatttatgatatgtagtcttatcctactgccactcccctcttctgctccacatactactaagtatgacttggtctctataatacgcactaattatgaagttttttacggagaaggaaattcttaatatagactaggattttttttcagttgtcttttaatggccttttattctagtaaacttagatttcttatagacatcggtttattgtgccgagctcagtagctcctagagggagtataaatttaggcaaaggaatcaaggaataaactggtattgtagaagagatgggagaaaaggaaatttttatttttgctttaaattactaaatcatgatgtttcctgtctctcagtgcttaccccaatcagtgtttctctcttttcttttttcctttcagtcccgaacccctaaaattctttgcttgcattaacttgcttcagattataagcctaattttactgttccaaatacatgaacttttcactgtatctccaagtgctcttttagagttcatctctttgttttccagtaactcatatttgtttcttcttatgcttaacacttctctctcatttttttttttcatgtttctcacattttttctttccacattatctgctgtagcaaacttgaaatatatgcttttggagaagagtaaaaacagtgtttagccatattcaggttattagcagcagctcctctttcttcacatatacttaaagggaccagaaagttatttaagctcttacttgctacaaatgctgttccatgtgctcctatgagtcagcacaacaggtattttttttttttttattgtacagatgagaaaactgagactttgagacattctatgaattgcctgagctagttggcagcagtgccaggattcatagaaatttggagcaggaagacaacacaatgaagattttactttgaggaatttagggttcatctatgtaaagtgatttttctgaggtcactaattatgttgtaggctagaactcaagtctcctaactcctaatatagtgccttttttttcttttctttttttatttttttaggagatgggtctcactatgttgcccaggctggtcttaaactcctgggctcaagcaatcctcctgcctcagcctcccaaagtgctaggattacaggtgcaagccaccgcacctggcctctaagagtgctttttcctagcatacttttcttctcctaaggtaaaaggctgtttgtcatggtacagctacggtgattttacttgagatatttgactttgagatggagatgaagataagtatataatgcagctgccacattcattctcatacaaggtaaagtcattcaaaagataaatcgaagaactatagatgtatttaagaagaaattcagcctatatgtaacaacaaaattttgaataatcaagttcagaaattggatttttaaaaacttattagctactttaacccttttgaaatattcccaaaaagtgttttctcttcctgagttaaatttattcatttattgacctattaaagatttttttagtgcttcagagctattctgtatatctgttcattttcgttatttagtagtatatagaagtaatagattgggctgaatagatttatttcaggatatatcttagatatttgtgttttttcatgaatcccagtttaagggttattgctttcaaaaggaagaaatttggttagtcatgacttttggctagttgaagtttagagaagtgctttatacaggatcttttatttagtgagaaaaaaataactttttataattttataatactgtgtgaaaaacctgataccaaaacttctgaaaaagaaaccaggcctaggagatgaggattctagggaagattattaaattgaggatatttttaagttagattctaaattagtaaatcgtggctaataagatgaaaataatctgatcctttagtaagatctgaagtaatattgttgccctgcaaaaaagtggttgttatcagcataccttatatgtcagcctaagcaagattagattttctcttttctctgatagatgccaatatttaacattgacttttatctactttcaaaaatatctatgaaatatactttctgtctctgaattagagtgtatgtatatttgtgtttacttgaaatgttatagctggatgatagatttcagagcagtttttatgcttagggaagccactgcctcccaaaaaggttttcttatgagaatgaggaaaataagtataaattttcatatttatgttattactattgatgtgcttggataattgtatttataaaagtaaaaaatgttcagtattttatctgaaatttaataatggatattgtacagcctaaggaattaaaagaaaaaggaccctttgagaaaatggcttgttcttatgtatcttaatatatactgtgttcactttatgttttgtcagacactgaaattgaggaagagagattttggcgttctgttggtttatggagagagttgatcagagattgctccttggctgagttgctgtctgcataggctgttaacaattgtttctctggcagcagatcttgttcatcaggattgcatcatttctgggagaatggccaaggtccacagcctcaatacaaagactgtctgaagcatatgaggcctgttctctttctgaagcggcactcctcttcctgccagtcctcttcacaggattactgaagcagacttgttctgaatttctttcgttggattggttgtttattggacttttgtctgccagctgcttccgcctcacctgtctgatgcaatttcttcttctgaaatctgttggaattgttcataaaacactttttgtttgtcttctctgtgagtgaccagggagatcatacaggtcttgtgctttcagcaagtcatatagagaagagactgtcagaatgatgatacagagactgttggccatttctgaaaccaattaaaaagatggggtaattaagaaacatttctggcatgttctatttaacatccttttccctagaaactgtatgtaaatggcacctcctaaagagagtactcggtactactggaagatacaggctgtgtctgtttctgaatccaagaacttactagtgttcctgtggattctgatggattgttctggaaatagttaaattaataataaattgaaactgtgatgcattcatttaccccctactgtacactcacatctatttcgctgttttcctcctttcctttttttctttcttatttgctattgcttcttccttgatttactttatttcttccttccttttactgttactttgatacttttatttctctaattctgggtgtactattttaaatcgtttctaaaaaatagtttattttccagttttttaaaattagaaatcataaaacatcaacataaatgaaatgcatgcgttctaatgcttggtaactggaatcctatgaatagctcttttcatgtttatgatatgttaatctttaaggtgttaataactctggctagcgttaaatttgacttttaggaaaaaacaccagagacttaaaggatactgatcattttcccttcctttttggaaggtagaaaattaatttaagcgccattttttaagcatgtttccatttgaccgcaaatagaactgactcctttttatcactcttttttatagtaggacaagaaactagatggtgtggaatgaagggaaagaaaggagtaataaatatggacttgtaatttaatgggtgatgatggccccttgtctggctggacagttgtcggacatcgggttaaagaaagaactctgaatttgagaagtgttcagtgaagaagggaagcaccttttaggagagagaaaaagaagggatcccttggaaaatgagataattctaatttgaaggaagaggaaaaattagccagtgacataagtatttaccatttaagtcaaataatttccttctctaccatctcgtttctggctttatggaaaaataaaaaattaaagggcaaaaaattcagtgccggatggacgtagggtggtaaacgagatagtatagatgtaggatgataaacaagacagtatacagaaacataatatagctgtagaattccattctgtgtgttcatcaatgttatttctttctgtactaatttttgtctcaactttttctaggtcttcagaactactagcagataatttggggggacttcatattcagaagtctatataaaggtgactgacccaagtaaatccttttaatttctgttttattttttgcattttaatgactgctggaatcatgttgtagtaaattgtgattataatttacttagcagatatttctggaacttctctacgtgtcagttattgttttggccattgaaactacagcagtggataaaaatccctgttctcatagagtttatattctggtaggaaaaaacaaacaaattataataagaaaatactgcatttagatgatctgttaaatgttcctcggttaacattttaatagctacattttacagagttacttagggaaggaactattcttagggtaatatttgagaaatttgggattattaacagaatttgaattaagaagcctcatcattattaaagcattagttagaatgagatggtcaagctaacctattatggttgctttcatcagaagaatgaaacagtcatgttaaactagacacaaggaaaatggaataatttttatgaaatagaaatttatagttaccgacaatgtttctttttttttttttttttttttttgagacagagtatcattcttgttgtccatgttgaagtgcaatggtacagtcttgactcactgcaacctccggctcccgggttcaagcgattctcttgcctcagcctcccaagtagctgggattacaggcgtccgccatcgtgcccggctaatttttttgtatttttagtagagacagggtttcaccgtgttagccaggctggtcttaaactcctgacctcaggtgatccgcccacctcagcctcccaaagtgttggaattacaagcgtgagccactgcaccgggctgacttaatgtttcttaaggattcatcaactatccaaaatagctgggttggtgtttcattagtgaatgtagcaatcatttattcactcattaagatgttatctgaagtaacttttccatcttttccttttagtatatcttttaaaaattgctctaggaaaaatatcaactatcatcttgggtttataacttgtcttttatctagaaactgtactttttttttttttttttttggagaaagagtttcacttttgctcaggctggagtgcagtggccctgtctcagctcactgcagtctctgcttcccagattcaaacgattctcgtgcctcagcctcccaagtagctgggatcacaggcatatgccaacatgcccagctaatttttgtatttttagtagagatagggtttcaccgtgaaaccatgcattttttaaatgggtgtacagtcgtaatggctacaacaaagggtttttaatgatattaagtacggtttttggtttaagtcttttactgaaaatataaaacaattcagattccctttgctgatcaggggaggtacggtgataatcagactttcatatgattatctggtcagacagctttggggcttttcttttaatctgaattatacagtaagactaatagaaagagtagtgaccaacagcccccagtatttaactgtcttttgggtttacttgatgagtgttcttgttttatcatttacagattttacttcaatttcccaaaggcttagaagatgtactgccaaggtctctgtttggatatactgttagggaaaggaaacatacatgtgtaagactggcctaaaggcaaaaaagttcatcagtccctttttttttttttttttttttttttttttttttttttttggcaacagggactcactttgttgcccaggctgagtgcagtggcatgatctcagctcactgcaacctccacctcccaggctcaagcaatcctcccacctcagcctcttgagttagctgggactacaggtgcatgccaccacaccagatttattttttttttttgagatggagtctcactctgtcgcccaagctggagtgcagtggcgtgatctcggctcactgcaacctccacctcctgggttcaagagattctcctgcctcagcctcctgagtagctgggattaccagcgtgtgccactacagctaatttttgtgtttttagtagagaaggggtttcaccacattggccaggctggtctcgaattcctgacctcaagtgatccacccaccttggcctcccaaaatgctgggattacaggtgtgagccaccgcgcctggcgcacaccaggtaaattttgtatttttagtagagacaggatctcgccatgtttcccaggctggtctcgaactcccaagctcaagcaatccacctgcctcagcctcccaaagtgctgggatgacaggaatgagccacttcatctggcccagtcatttcccagcccagctatatgtcacctccaattgggtgtaggaacaggcgtattgtcatacccagaggtctcacttcatcatctaggctggagtgcagtgcatgattatggctcacctcagcctctacctcctgtgctcaggtgatcctcccacctcagctcccaagtagctgggaccacaggcacacatcaccatggctggctgatatttttttactatttttgtagagttggggtctcactatgttgtctcagctggtctcaaattcctggactcaagtgatccttccaccttggcctcctaaagtgttggtattacagttgtgaaccactgcacccagcccacaattttttttatttgcattaatatcaaagtaagattggagcatctcagaccatctaccatttacaatttacattaaccggccaggcacggtggctcacgcctatagtcctagcactttgagaggctgaggtgtgagtggatcaccggaggtcaggagttcaagaccgcctggccaacatagtgaaacttcatctctactaaaagtacaaaaattagccagacatggtggcaggcgcctgtaatcctaactacttgggaagctgaggcaggagaatctcttgaagccaggaggcggaggttgtagtgagccaagattgcgccattacacttcagtctgggcaacaaaagtgaaactgtctcaaaaaataaaaataaaatttacattaaccccctgggttgactcagtcggtatcatgtacttttcattcctttagtttttttagtattaataattgttctaatgtcttattatgaatcagtgtatcagtcatgactctctttgtagtcttttttgcaaaagtccttgttaacatgggtctttgacattcacattgactttattcccccccaaataaaatgctttttgtttcatcctttcaatgttttttacactactgtaaaactactaatgtaaagtcacacaaagaacacttgtttccctctgcaccatacctccaaatctcttaatctatttttgcatttttttatacttcagtaatttctgagtctttctgttcccagctttcactggtttatggtcaccatgtcaagctatcctcaccgctttttcatacacagttgtttagtctttatcatgaaactgtactcttcgtgatttcgggggtttttttgttgtttttaaaaagtagtcaacttttttagagcagttttaggttcacaggaaaattcatcaggagatacagagatttcccatgcaccctctgcacccacgcatgcatagcctcctcctggtttatatttttgttcatatctagcagcgtattattaccccacaaataaagttgctaagatgattgcatcttctcccaaaattatagttaagatgatttaaaagaaggaagagagtgttcaatgacaaaagaaggcactaagaaacagctgtttccaatcaagtataaacaacaaattgatctcttttaatttggaagaaataacattattgactgcttgtgaaactgcatttatttgtggcctaggaaaaaaacttaaatgaagatcttgaatttttaaagagtttaggtaaactgggatatttttaataaccatcctttatcttaaaacttgtttgctatatcctaggctgccagaaaattttgtttgggcagttttagaatggggagaatgtgttggttagtgagataggcagactcttcctttcccttcaactgaaaagaaaaacaaaagtaaacataactttttgccccctactttgtgaaacattaatgaaatgcatagtaaacatgggacactgtggctgtatttattttataattatcccttaaaagccttattcaagaatgcagaaaaatattcagtaacatttaagataaacttgaagaactatctgataactaggtatttattttactagatattttccttttctgttacaggattcctcatgtccataacatgttggatgaggctctgcagctcacccccactctcagagtggtcagtctccattaattggaccccgtgatttccaatctctgctgtgttggacgtcatgagcattgcaatccctctgggagtcaccacatcagatacatcctactcagatatggctgctggatcagagtaagtgctactttctaggtagtaggtacattatcagtctgtgtggagacagccttcttatggatagctaataggataatatgtagtattttcttaaccagatcctattccactgtaattaacattagacctttccctttacccccattgaaggtggtggaaaaaaggaattagaaggggaaggaagagttttcagaggggtatttctgggcaaataattaatagaaccaaagttgcaaagtaggaattcattttcatttgttttaatgggtggagaaaattggaataaagtaggtgttactacctgcttctgtagagttaatgattctgatggagggagataagaaggtgttctttccaactgattttccttgaagtcctcttcctatgtacttcccattgttctagagtaaaggggccgaaactatatgggcaggttgcctagaccttctgacatctggggtagaaaacatggagaacagcgtcatctgtttttttataatattcgttgcctagaaagaggaccttcaaaatcagtggtaccaaacttttttttcagctaagagcagctttaggaattcagagtttgtccaaaggcccaatccctaaaattatactctcaattcttgaagaatgtaaatgccaaatgacaatgaaggtaggccttcattatacaactttatatatattattcacagttttaaaatttttagtcttttgtatcccttctcttttaagttgtccgagattccccctgctcacagattccccctcttgtccttttacctcccttgtacccaatcttccttgcttacagaaaggaagtggaagccccctacctttcaagacgaagtggcactacaccaggatgtgaaagtccagcgaaagagacccaaggggcctagggggcagcacacccccagaagccaagtctattccaggcagtaccagggattagggtctgggctggaaaaatcctggtgttttgaatatgttcaggtccagttcagactcttgatcccacagccacttcttgagtgaggtgggtgttgctctaattcccctgtttctcttgccattttcacagtccctggggattcttcccccttcagcaaagcaaagcaactgtaccagatttctgggttgaatgacatccctgattaataagtggttttcttccttaaaacagaatattattaaagagcatgtatatttcttcataaagccacctaatataacttacctgtttactgagttccttaaagaggaagacttaaagctaccctgagaaatagtatataatattctggggtagtctaaaatgaaaagcagtgtttgggcttattcccatataaaaaggagaaaggagggttgggggtggggaagggttgattttgtttcttctagagcttttttcttcttttgtttttgtttgttttgttttgtttgcatgcaaaaggtatttagttatgtcagtaactgagacttacttaaccattttacaactctttccccaaataaagtacttaaaactctccctgcattagtaggtagccagtttgtattgtgtttataggtttttataaagtcagctactaacctggtactatgtagattgtctaactgtatagatagatagcattaac

SEQ ID NO: 368 - DNA, 5481 bp, Homo sapiens
  source 1..5481: mol_type = genomic DNA
tatctagttacagaatggttgaatgacaaagcagagaagcaagagtgccctgttgagtgccctttacgtatcacaacggatccaactgtactggcaacgaccctaaacatgttaccaggtcttatccattccccgttaatttgcaccacccccaaacactacattcgctttggctcaccctttatccctgagagacgtcgaaggccccttctgcctgatggcacattcagctcctgtaagaaggtatgtctgtgtttttgtgtgtgtgttgtgtttatgtgtgtgtgctttatttttttaagcctaagattcctatcatcatgacataaataaaatgttctctagatagccactctgcccatgtgagtttataatgagttagttgttcagccataaatactgattcatcaagagtctgtgagactgtggtggaatgaatgtactgcatttttagtgctcagatttgtgactggtcactgatgtctcttctgagaacccttgaggttcctgagtgagagcacacagcagtggatgactgggtagagacggatatgttttgtgtgtgctcttgtgatatgggttaacatgtccatttatgattattgtgtgagattaggccctgggtcctctagaacactgttgcataaatgaaaaaaattaaattgttttgaatcaattcaaccgttattatccactatcatcacttgaaggaaattagaggaaaaatcctattgtaattggcataattcctgttccttgatcaaatgacaagtcggactgtttattccaagagaatacagaatctaccctaaaagactctctttccctctctgtttctgcctctttctcctctttccagttacttactgtttttggatctagtggcagtagcgtttggtggtgtttttggaatgctctttcttaattcccagaagccctgcatattttccaaaggtgtctcttaggaatagatcactccctcagatctatgatgtcgttttccatgtttctagaagtataggacaccctttcatttggtcttcctttgaggtagagtctgttccctggaacacccttttctcttatcctcagatctggattcaggctgccttcctcagtgtctgccattgccctcctccactggcatcacgtacatgaggatgctgcatgtagattatttgatgtgatgaagtctccaactccaggcaggtcttccctgactcctccaaacttaaaagcttttctctttccccaaagaacagaagttatttctccgggggaggggggcatgaaagatgagccaaagtggtgtgggatatggaggggaggagggcaataggaatctgcaaaaaggaaggacactactgctgaatgagcagcacattgcagaaagtcttttcctaattgcacatcttacctaaacattggaatcactcattggtttgttcggggaaacgctcgtagaattcctaaagagaaatttgaccatttctaaggatgttaactgttgaagcatcttatcaagccaggtcgtacaatctcctattttggtcctttaaggagtgtaggcaattatttattacagataagtaatgaagtctgagctgcaaataatatgaactaggctcttgaattgaaattccttcttgataattctaatgctgggttgcagtctttctgtttccatcttttccaactagcagagacttaacgaaaaccaaaaacgtgtctaggactgtaacttcagatctggtagaaaatgcatttctttaagcttttttaacttggttctgcttttatacttgtatctatagcacatccttaaatttctacgggcaacagatagaaattccatttaacacaagtccctgttatattctccaagtgtatctgactatccttaatctcatttatacaggctctactcaagcacttttatctatgtgtcatggttagtctttaggaagagtttaggctgcatacacaggattatcataacaagactatttaaataggatctttaaaaactgtttaagtcattgctttattgtgtgctgttcacatatcaagattctattttttaaaatacagctttttatgaggcaaaataaaatgaaatggaatgttttagctagaatagaatttggctttatagcagtgaagaagagttcttcttctaatattggtcttcttctaatatctcctaatattggttagaaaggacttacctaatgcagaacctaagaacattttcattattcaacaaaattgtaataaaattctgaaaatccctcagagtataagttaatcagatagataagaaaaccctccatgggattatttagaacaatgtatatttctaataggctcactgtttcatatctcactaaagaggtaagggcctggccttgtaagttaaaaacttaccagtataggacaaattaaagttgtatctgtatagttgtactcagattcttatgctatttatttttatttttatcattattattctgcaacttctgaaaagaagaggagttcaggtatttgacagaacattttatgatatccctagagtttctaaattgaatcatagtttttaagaagcattttgcattttttagttcctcagttggtattttaaaaacatttataagtggccaacaaggctctcagtagtgtttcaccttgttctctctaaactcctcttctaaacacaatgtgtatagggcatttggtctccagacttcttagaaaaaccagtctgactgataatgaaacagtgtgctttgcattgataattaatatttcattttatacactggagcattatctgtaaatctccaaacatagcattgaaatttagttgaaccgggactcggtgaaaatctgctcagtgttcagtactgtactataagctttcttcacatacattatctcacttaccatgcatgaaattgggatcattgtcctaaatttatatatccagaagctttgtctcagaaatgtttggtaacttgtccaaagtgaagcagctaataagtgacacagccagatttcttctggtgggggatagtaggggttcacagggtctcactgttgtccaggctggagtgcagtggcatcatcacaggctcactgcagccttgacctcctgggctcaaatggtcctcctacctcaacctctcgtgtagctgggaccacaggcacaccaccacgcctggctaatattcatattttttgtagcgacagggttttgctgtgtttcctaggctgatctcaaactcctgagtgcaaggagtctgcccaccttggcctcacattctgctgggattacagatacgagctactgagcccagcctcacagccaagtgtcaagccagggcttctggactccaaaacctgtattgcttccttgctctttcgccataatagcgagacctttaaaatatttatccatctttgagcctcccagaaaactcctttgcaatatattttaatagaggttcagagaagggagaaatgttcttttgattttaacaacttgctgagtaggtgcatctaaaattaacttattatccatgaggttaattgtatcttgttagatacaaacaaatgtccatgttccttttttatatgagtcctgaaatattgtaaaattatacaacagaacctggaggagtaggtttgattgtatttgctgtgtttcacctcatagctaaccatggtagcatctttcttctagaatactcctgttctgattttatgttccctttttgtagtcatcagatccagaatgtaaattattttacaagtacatctactagaccctggaaatattaaaaaattactcagataggaaagcttagtgaccccaaatgagtgttttctgctttgaaaagaaaaacttaaaggtggccataacaaaagatttttcactcctgagcctaatttttccatttataaaatgagtgctttggacaagatgacttctaagttctcttctaagctttaaggctatatgtatggttctgacaattcatctttacatcattattctgtatctaagatagttcattcttcggattttttattttgtttttgtgtttgcttttcagagacctggttgtatcctaaaatgtttacgtgattcaaattaccattgagagctcttttttatatccttgttcactcttccttccaagtgtttacaggtttacagtttcagttttgctttcatttggccagccacaatgacatttgtatgatgtaagatttttttttttttttttttttttttggtaaaatttttgtggattgtttcctaggtttctaagagggaaaatctatgagaattgctctctggtgaagagagtatttacttacctgtaatacatgttctctaaaggtataaattataataattcacctttgctcttcctattgggggagggtcttactcagaaattgatgtttatcaaaattcgatctgtcttatgtcagggcaggagagccacagagtggtgagcaacctacaactgtatatcttaagagaacacaattacaggtaagaaattttctgtcttccacaggatacataatcttattatcctaatctttgcaggtttactatctggcctaaatttatttcttgtcagtttattattctaatctttactaccaaaaacttgtgactgataggtcttctttttgactttttcccttttttttgatttctactgaagctcatttcgtgatttgcattactcatgcataatttaaccaaactacttgttggaggggggagtcccataggttatttcatttgaaataaaccttttggaaacgcttttggtacctgtagtgaagagctattaatcctcatccaaaatcttccaatgaatcttttttattacctcttcacacgtctctagcacggggcagacaacttttaagagatctttatcttccttctaggcgcttattttatatattagttttattctatacgatcacagtctctcctaaataaatgttaagatttcttcctcagtcttgccattttacaccatcccaaatggtatgaaaagttgaatagcagtcattttttattggtttttgtcttttgatgggatctcattatatgtaatccagatttcctcaagtttttcagttaaaaggaattgataggacaatgttccaatatgctgagacacaagacaataaaatgcttgactgtgtaactgaattagtgtgttgaattgtatcactcaccagttgatgtacatttaaaacaggtgcactaaatagttttagataattattgataattctctggttcttttcaattatagcgctggataaaacaagccttagaagaagggatgactcaaacatcatctgtaccccaagagactagaactcagcacctataccaaagcaatgagaatagtagctcttctagtatctgcaaagacaatgcag

SEQ ID NO: 369 - DNA, 32765 bp, Homo sapiens
  source 1..32765: mol_type = genomic DNA
gggcctaactcgagtcctgccgcctcccgggagtgccgtgcgccgcagcccgggcccaggccccggcagcgcctgggacaaggtaagggtccgacagaaaagagaccgaacctcacgatcgggccccaggggagggaagggtcacctcctccgtctccccgcgctcgctctccttgggtcgtgggcctggccctccccaagctcttaggaggatgctgccacttctcacccccctcgccgccttgcacacaccgttgcaacaccccattttcccagggagagagatccccctctaatctaggcgacccaactccccctttcatgtttttcctgggtcaggacgcttcccctcccccaacgcctcttcaccccctttcctgggaactgcctactccacgtttacctttcccttgaggagaggcctcttgctgccctccgctcgaaatacacaggcatactttttttctctccccgatcccccactccctacccccgttctcgcggccttgtgacagacaactctgatcgctctgggggccgcgatctcccctccgtaatcttcctggacgccttccctctcgttttctggcttcccacctcagatggctgcttcccaaaggcattaccttcgccacccccaccacacgttctctggctccccgtggcgtgtgccacagcgtgtctgagatagcctcgttgaatgtgtagggttcgagcctggagttgagccagattgtgtcgttttacttgccttgggcgtggagaacgatcttgtgagaatatcttcaaaggcagaaaaatattccctttatgaattctctttccctctgcgtgtaagtcgggaatgtgaagaggagtgtaggaaagagccctggttcaagtaggtaaatcgcatgagagggaaagttaaactgttgggaaagccccttctatgctaattgattctatagagtccttgcttgtctcacttcttgggcgtcagtggtctttctcttggatatggatgctgcagtcagctctgctggtctgggtcaggggtgcgtgtatgacctgcattttctgctttctcatgttacttgtgcaatgtattcaccggtaactcatttctttcccagacctctgggttccactgggctttgtctatatttaagttcatttctccagtttccttcctgcacataggtactgaacgaatccccaagttctgtgctaattaccttcatcagttgactaaacaagtttttagatgacatatttgtgaccaaggtcatatttacatttctttgttggacagatgttacatagctatacttgtgattggggaggatccagctgagtggagtgtgctgagctttttaggagagtgtgtactccctatttgaaattattttttggttgttaattttatattattaatgtttttaggtcacagaaagttctaagtggtaattttagatgtgtgggatctgagctaggactaaagcagagaatacccacgtaatcagaggtttctgggctccatagaggacgtagggcttttttttttctattggatttcttccagttttctcaggatcattagttctcttctgtagccaaaaattctggcctgttatgggattagagtctttaaggtttactcagactgtcattatgtgtagaaaaatgaattatgccctttggtaggacatgacacaaggctctgtttctagctgcaaatttaaattagattgtagagtgcttgggaaattggctttcaaaagaccaaagcttaatcttcactcctaaactgctggcttaattaaaatggatatttagaatttggtaaatgttgatttttctaataaaaggccttggtttaaaagggtgaccttaggattgtttctttcttaaaagcataattccagcccttctggcatggagcactggtccaaaaaaaaaaaaaaaaagtgtgtgtaaggagtgggggtggggtaaagagaaggttgttcctttgggttggatcacaggggtgagtatacaaggcagcagcagctgctggctctggagctctggttgctacgtgagaagcttgagtagtgctggctgctgtctccagggaaggacagcagtgcagcgtccattaatgctgctggctgcagggagcagcacttaggcgatggctgcttcaggactaagaagaaaccttgcttttctgggaattttcactgctgagctggtttgctttttattggtggggagatgggaattagtaattcataatctcctacccatttatggatattggcatctggaaactggatcatggttaaagcctttctttttttgtttgtttgatttgatttttgttttttggcagatttttgttttttatctagacatttgtgcttggataggactaaaagttccattagagttttaatttttcaatcagtttaaaaacccaagtaataattttaagaatctttctgataaccacaataggaagaaaataacaggaattttttcctgcagctcacatatcatgccttcctccatctctttaatcatagaatcaattcttattattttgttatgtgtctccatcctttcgattagaccacatttaccttatagacgatttgctaaacattttactaagcttgaactcttaaactctaaaaaggtgccattttggagtggtttctaaataaatatttttaatttgtatattagtaataaacttctccagattagatattttctttggagtttgacttataagattgattcattatatacatgttggatatagccttctgacatcacaaatatatgtctttggccataatccatctgaaatgtaggacagaccagaagaaatatgcagaaatcgaataagtctagttcaggatactgagaagatggcctctgagccccttaggtgatctcccctcccccacaactcctgaacattaggatgatctctgattaagcaaaacagtctgagcgtggaaaaacttgaaggagaaccaccaccaccaattatatgcaatactggacatattcctgtgtgctgtttttcttccccaagactcgtgtatcctatacttttttctctcagaattttgatttgttcattttcgtgtaaatgtacttaaatctcacaaacatctataatttgtagtatcactctggcatttgtggcagagaaccaaaaagaatggaaatgagttttgtcattcacaaatgtggctcacattgttttcccagtaataaaagcagaccaatgaaacagaacctttaatggatactattttaggaggttccaattcttattactatcacatagataagatgcaatagcagataaatatgatttcatgtatactggctgtttgacatacttagggtttaagataaaaatgtttgtagttttttactctgtggcttaagttgctatataaaataattgcttttacactcgaatttcctgttgtttggaaccttttgtgctcttgatattatcattttttagaggatcatacaggcccttttcatagaaggatttacttaagttatacccttgaaaacttttttatatcttttgatactgttttgtgtccaggaactgactttctgaaattattctggcttttctggggagaatgactatttcatttttacctttgaatggggaaataataaagtgcaaagtacagatttgcagataattacttttgctttatcctctccatgttgaaataacttatgaaaaattaggccatagttaacagcagtcaatgactattggatacattttatcagaggggaactggatcatgaataaaataaaattttaaaaataatttttggctgaactctggtgattcatcagtttaatttgaagtcagaaggtctagcagtgaattttatttataaaaattgtatttcaagtgttgaaaactgaaacttcttgaccagtatattttgtttgaggcatcaaactttgcaaaatgtgcatcgtatatttagtgatataactggtagtcatttgtaatttaaagtattctttcaaaggcactctttagaaagtaatgtagtgtacccgtgatgggcagggattggtaccattccttactgccaaaaattccaaaatatgtggcaaaatgattgatttatcttgtgggtgggattctgggaagttcatgaaaggtggagagaatatagtttccttcacttgtctatatacattttgttaaataagtcttaggaaaactgttttattgtatctttaattatgaattgcgtaaaagatacccagtaactttggggggaggtgctgttagaaagcattacattggagagaattcccctaccctgggacaaaatgcattctgtctttaatacttagcgaagggaactatgggataaaataaacaatgaaggtaagctcagtctgctttatatgtgccctcactgagcaaggaatttgtaatcgcatcgtgcctcattcgtttataccatcatattgattttgtttgctgagtacctgagggaataccttacttaatgtaaggtcacattaagtatgtttgatatgaagacagggaaaggaattttctgcttcttggagtaatgtcttagtatttttaaaacacttaagtttttacatcaggccagttttgcctgatgctcatgtctgttgctttggttgggctgctgctttctcttctgtgttcttatgggttcgttgtggtataaggattcccacagctttcatggcagtatgaagtaatgagaagcattgccttagccatgttagttacatgtatacttttggcctatgttatgaatcacaaaaagcggtagctataggaatgtatacaaaatagatttctgtctggggaatcaagtttttgatttgtgctacctaatggaggggaaaatgctgaatttcttgctgctctgtttgagaaatagatggaagcatgggaggagccagagacctctgcagcaggatttggtctaagtagaaaaggaagatttttgtttcaaattgccagctgcttatgtcagactgactcccttattatgcctccagtaggcctgtcaatatggccaaacagctagataagtgcggggcaggacaaagggctctttgcacagcagggaggcaatgttggtgggggaggggcaggaggtaggaaaggcaagaggaggaggttcttttccctgggagattattcagtttggcatacaattaaagaaatcatttttagttcccactcaagcattgaatttttgccaaccacatactattaaccccaaatttgatacatttcagaatatcttgtagggatccattctcgccaaggaaaaataaaaaaataaataaagctctgtataggttaaaataaaataaatcccacactctgcaccctcctaggtgcaagtcacctcccgaggagacccgttctagagctgaattctcattaagaaatggaaaagaatactctatctgaataaaaacacattgtaatacaatgtgtttatttgggttgggattggacctgaacatgtagaataatttgtttccctttatgaaatagttgctcgtagttgtctacaattttatttcattaagataggtagcacattacagctttcatgtgttgggttgccatatgtaaaatgctaactgaagaaaggctactttttaatttcagcctcatccttagttcctggagaacctgatatttcctggagattactccctcccccaccttttagtttaggcaacctcttttgatacatttgtgttcagctcgcatacaagtgggatagttgcatccagtttattaagacttagtatgaatcatagagttggaaaagatctgttggttatctggtcctttaaaccaaaatcataatgaaatattttgaaatttgggtccctattgaagttttcattaaaatgttaaaggatcggtgttctgaacaacatttttagttacttttaaaataaatgttttgcgtcagttctttttttaaaaataaagaatttcatttataggcaaattagctggcaattatttgaattgtgataggatttctcttttatgaaggaatatatgacaaggtttttcaaaatgcttaatatattttaaaagactttaatttttagaaataattggtttgaacagttttccaagagcacatttgttgcttgggttgaggtaccacctatattgcaatgttactaaactagccttaaagttttcccttctgtctatactgcatgcaacaataaagggaactggaatgttaatttccatttatggattagcagaggagatgttttaaccgattaataaccaaaaaactgcctttcgtacacgtaatattaagcaagcctgaccaagttttgtgttatttctctctgttaaagaaaactggatgtgttactacttaacattatattgttatttaatggtcttggcagtaatgatataatatttcgaccaaaagaaattttgagtaattaattattattgtaattagttggaagtttctcatcagtaaaatagcaacagcattaacacaaaatctagtgagctatattttatattactacagaaatttagggtagtcatttctttctttataatttattcacatggattatttccataaatttgtgggactaaaatagaagccatctagtcaagcaccagtctccataccagacagttttctctgcatgtgctatgacccacattgccagtattaaacatcctttacaccctcccccttcccagataattagaaatctcttcagggtagcttccattgctcctattacctggatcttgctagaggctctaagaagttcctggtaaaagtgagacagtaagggaccacattttgattccaaaggttttgataactgttagggctccccaaacagctaatctcattttcaccaagacttagccagcagagggctggaatggaggtgaaacacaagcactgtacctcatcttgcctgtgcagctgctccaccttatttcctgctattattatctcacaacgcctcctcccatcaaaaagaaactaggacaaagggggaaaattggatgggctaatgtgatttttattatgctaggttgtgggcttgtttatatgtacttaaatacaaagctaatttgccccattcttaaaagtctttagtgatagagattttgtaacttctgtatcttctactttctttcttgataaaccatttcagattctcagccttacagaaagaaaggttttaagcatacttaattttcgttggccgttcacagtcattattaccaccagatgccactgtattattagcttgaagaaaggtgggctctcttctgtacataatatctgcaatttgttttggaaaatactaatttgtataaatctgatttatgactaaaataaggttaaaaattagacctctatgtatgtttaccctattaccttagtgggggtgaaattaattagctctttgaacataaatttttcatgtcttagagttcttttttcaagctgcataatttatgttcttcaagccatttttatcccataccacccccacaaagggggaaattttattttttatcatttttattgtctttcaatggtgagattttcgccaccccactcctgaaatgtgaagactcaaataaaactgagtaatctaataaggtatatgcgttgctgaatgtagtaagatgattgtttcatcattcttagatattatgatctagtttgaatctggtttccagtatcatgttagcatatttaatactgttgatatgttaattttaatacatgcccaggtggatctccttgctttctatttgtgccccttgtttgtcgttttgtatgaagggggtttttgttgttggattttcttccccatctctgtgtcctgttatgttctttggcttatgtttcaaaaattctgtttcctaccaccaacctctgtacatgccacaacacatacaatttgtactttcacagtttctgtgaagtaggatgatctgcagttaataatcaactgtttgggcattcttggtatccaaggaaggttttacttagaaggaagaacctggaaggacctgttggcaattagactacttctgcgtttattttacattttcccttattaacgtaggctgttgagagttgacttgttttataagagaaaccagattgacagagaagacccccaatcagatagagttattttaaaaataaatgtgtttattatggtaacatttggggtagaatctaaagggcatatttttaaaaaaacttttagttctaaagacaaaagagtttaacctaaaacagaacaaagagaagggcctttgaagcagtatgattgattatatgctgaatgtagcattagaatgttgtatgaaagcataaatttttattttctcaatttctatggtacaaactactatgcccatggaagtatgtgtttatgcccacagcctgaaatatattcggtggaatgccttaaaaaagaataaatctggccgggcgcggtggctcacgcctgtaatcccagctacttgggaggctgaggcaggagaatggcgtgaacccgggaggcggagcctgcagtgagccgagatcccgccactgcactccagcctgggcgacagagcgagactctgtctcaaaaaaaaaaaaaagaatagatctgaggaaaatgtaagagcaagtctaaaattttgaagtcctttttgaaatgctattttttcctagacaaatttagtgttatttgtggcaaatagaactttaatgtcgtaatttagtaatagaacaaaataagggtgggtttacatgtccctgcacattttaggatggagctaaaaattataatgtctgcataccaaattgttacacattttaatattggggcttttattgaaaaagtttacccaatatttagaaacctttaaaaacaaagtgacataaaatattcacagataaatcaggtagtcaccttattggtggcatattatgtaagtgtactaaagccagatatttagtgttaatccaaaaatatgaaaattatgctaacatcatatacagatctcagaagttgctgtagccagccaggcgtggcggctcacacttgtaatcccagcactttgtgaggccaaggcgggtggatcaccttaggtcaggtgtttgagaccagcctgaccaacatggtgaaatgccatttctactaaaaatacaaaaattacccgggcatggtggtgcgagcttgtaatcccagctacttgggaggctgaggcataagaattgcttgaccctgggaggcagaggttgcagtgagccaagatcgtgccactgcattccagcctgggagacagagcaagactgtgtctcaaataaataaaaaataaagaagttactgtagatgccactcttacttaaaccctaggccatgtgtggagtcccaggggaagacatgtatttttagagaaggaaggctctaggtaggtgtaaccttcctcttacagtttatcatgaacagttagtatgaaaaggaatggctggaagtttgcagtagtacaccgagcaacaagagaaataaacatatcccacttcatgaaatgactatgccagccaagggagatgaaaaacaattttttttatagtacacctcatttttttaaaaacactttaatactaggaatatgtttctgtggcaaatagttacccccaaaggattatgtcaaatatctcttgtgaaaattaattttaaaattaatcttttggctgggtgcggtggctcatgcctgtaaacccaacactttgggatgccaaggtgggcagatcacctgaggtctggagttcgagagcagcctgaccaacatggagaaaccccatctctactgaaaatagaaaattagctgggcgtggtggcgcatgcctataatcccagctactcgggaggctgaggcaggagaatcgctcgaacccaggtggcagaaattgcagtgagctgagattgcgccattgtattccagcctgggcaacaagagcaaaactatgtctcaaaaaaaaaaaattaatcttgtgtagatagtgaccacgttttactttccttgggacagtcctggtttatacctgctatcctagcgtaattagtaatagcacccgtttcactctcaaaaatgtctcaatttggatcataaattatacgcttaccataattgtagaggattgtgagacttttagtcgctacctagcaacctagtttttcttgatagagctcttcttattctggagtctcctgtgctgcgatttatctgttgacctctctgaacccccatttccaaatgagcagtttttcgaatgtcttttttcttttcccattaggtggtagtaagggaaggagtaggtatagatttgattaattttttaattttttattattaaaaactccaattactacaaaatagaaaaatactttggagtttattaaactgttagtttaaaaggttccatttgatcaggataaggtccataccttgattggtaagtttgagtctttatagattctgttttttccatgtaggattcttgttaaagaaattcattattttgtggagttcgtactctggattttgaaggttggataatcatttaacacattcctctattaaacaacctccccccacctgtatttcatgtaaattactgcttagatagattgtaagcatattttataatagtactgtgtatttccattaagagttacataatttctgcttgtctgtgtaatgttaagcagctgttgttattcattgcctagatcaaactttgtggtcttaaaaattgaagacctggaagagcttttgtttgtgtgaattatgtcaagatttaccatattagaaactaaaactgagaaaaattttaagttatttattaatattaaaataacagtaataaagcctgctaatacaagtaatgtgattttttaataaaaataacatttttaattttataagtgtcgtttgacatttttgcaaatctctttaatgtctgacttaatagaagacagctgctttctcataactccttctgcatttaatttcttgtgataagttgttttggttgaagactgaagaaaatctggccttgtacagataattggttggaaaatggaagacctcatataaccctctgacagaatctagaggacttcaggcattctcacaccaccctttttgagaatcactggcctatattcatgatttacttcatattagatgatattttcttacttcttcatttattgtccggaatactcacccttatttttatttggctatactaagatagtttatatacagaaggtaagataagcacttgggttttttacccccttatttactagttttcaaaataatgggttggtaacttagcaacatctaaagacgtgaatgaagtattattattgtgtactcatggttttaaacatgtttgatatgttacagtctctggcagttactatttttgacattcaggttgtcctacctttgtctgttggctactaaattcttttgattcattcttaatactttcctcacttgtttccttgcttcctactattactagatgttctaggataattttgtacattttttgccccaaacctggaatcagccatttctgcagaaacctcttcattcttttaatgaaaaatggtacttagaaaccacagtatggatggtaggagtgttcattgctcttggtttgggccttgtttctagatttttcaatgaacaaagtttaaaagtattttatttctttttaaaaatatcacttggtattttaaaagctgcatttcaaactcagtgctacatgatgtttacgtaaacctaatctttctccctttccccatgcccaaaatctcagttttcactaacaccaatgtaatttctctttgttttgtgccacaatacacacactacagttttagtgtgacagaacaatatgattactggaaagtggctttttgttttgttttctcatgtctttttgcccttagggtatatccctttagagatagagatagtcatgcctcacttgatgaggatattttctgagaaatgtgttgtcaggtgatttcgtcattgtgtgaacatctagaatgtactaacataaacctagatggtacacctaagctatatggtatagcccattgctcttaggctacaaatctgtgcagcatgtgaccactggatactatacgcagttgtaacacagtggtaagcatttgtgtatctgaaaatggaaaagataaagtaaacatacggtataaaagataaaaaatggtacacctttgtagggcagctccattacagtcttatgggatcattatcatatgtggtccatccttgactgaaatgtcgttatgtggcacatgaccatatatagtcagattacagtattttgaaatcccccttagaatagttctctatggttgtgccaccagtttgatacacagtgaggttaatttgttacattttactttcagatttttcagggattaggttttgttttatgattatgtaaaatacttaaatggttaataagtgaaatttacgaagctgggtataatcagaaaaattgagcttctatcctagtgtcttccagctggttctctccctgtccctgtatgttagactcaacagagtcatcatgaattttcagagtgatgttttgtcgatacttccccttttagcagaagaagcatttaggttagttcatttactaaaactatttccttctagatttttcactaactaatatttttacactgtagaagaggaatgtggaaatttctgttctttcttttttggaaccagaatttcttggcttaatacaagcagtttgagataagaaactttctccagtaaaaattctctttttttttttcttttttttcttttttttgagatggagtctcgctctgtttcgcaggctggagtgcagtggcatgatctcagctcactgcaacctaggcgtcccaggttgaagcaattctcctgtctcagcctcccaagtagctgggactacaggtgcctgccaccacgcccagctaatttttatatttttagtagagacagggtttcaccttgttgttcaggctggtcttgaactcctaacttcaggtgagccaccgcacctggccaaaattctctctcttgaaatgccagaccatgtttgtctctgggaatttcaggtacacttgggacactggtgctacttgaagtgtagagagctcatcagttaacatttcttgaatggtttgcccttagacctgaaatgtatgttatttagaaaggatgtcatatattttttaactttgtcatttaaaatccaagttatttgattttatgtgttttaaataaaatattaaaactttaaaagtcttgtacctgttaaatgttttatccttcctaattacagtatcttaaagttatcacatttcagcaatacgtcactttctaatgactaatatagtctttaaaaatactaaatcaagatataccaaaggtgaagaaatagtgattaagaatgtgaggattctagctgtggttttcttgctttggctttggccaagatgagtttaattctttggtctaataggaataatacttttctcctaaacattatgagcattatttgagttaatgcatgaaaagtggttaaaggaacagtggctggtgcaacataagcatccagtaaatgctgcctttattttggaagtggttattgttacgagtatttgatcagttctctaaactctgtctgaactttacttagaattagtaatgttcatatgctgtaaataacacctgattttcaatacttcattggttatatgaaaagaaccaactgttaacaaaggaataattggtatctagttaaaatttgaggcctctgacttcacaagtataccagtgcttactatataaatataatcacatttaaaaatttaataaagaaagttttaaggaagtaagtctccttttcaggatccagggtcctttacaaacactggatcctgaaattgtattatttgttgtggctttagggtattgtgtatgctgaccagagtcacaggtggtttttttgtttgtttaacactagaattttgagatacatttgtctttacatgccctcaaagtaagttatataacaccagattgttcattagttcaggtttgatttttttgttgttgttttttgtttttctttttaatactctggggttggagtgaggttgtagagtgctataaggaattcctattagaagatagtattttagatatgggcattctaggaaaggacaaaatggtacactaaagttatcttcccttttcccccaccaccaaaaaaataaggagcaaactacagtgcacagttttgggttttttttttttttttttttttttttttttaaagagacaaggtcctactctgtcgcccaggctagagtgcagtagcacaatcattgttcattgtaaccttgaaccactgggctcaagcagtcctcccacctcaacctccagtgtagctaggactacaggtatgtgctaccacacccagctaattttttaaaaaatatcttgtacaggtgggggtctcactgtgttgcccaggctggtcttgattgaactcctggcctcaagtggtctcatacctcagcctcccaaagctctgggtttacaggcataagccatcaggcccagcccacattttgttttttaaacaagtctttatcttttggagatacatgctgaaatatttatggatgaaatgaaatgttatctggggtttgctttagatagagaggagataatagatgaaacaatcaacttattagttggtcattgtcgatactagataatgaataaatggacttctttataccattttactttcatactttatttgaaacaaggtcttgctatgttgcccagctggccttgaactcctggcctcaagagattctcatgcctcagcctcccagagctttgggattacaggcatgaaccaccatgcccagcccataatagaaagttttaaattttaaaataaaagtattcatagacttggctatcatggatcctggtaaagtagactagtgaacataatcagatgtttcagtctttccctgttgatactgcttgccctctgagcccatttcctctcctgatcatcgcctgctatttccaatcaacagaaaaaatagagtagcctacatatataatgagtttatactaagagggaaattttaatattataaagaagtctatacagattctggagagcattcctgaagagaagattgaggaagcaaatggattaattaatgtaatagtgtgttcagtgtgcaataggtaacattttatgatatggttgaatttctgaaaaggtatcttataaatatcagaccatatttaaggagacttccacctctactgataaaatctgcccttctctctccccctgactttattgctgcccatctgtagttttgatcttttttctctaggattctttgcctagaattgccatgggccttctggatctggaacacggatgaaggaagaggatgaatgtttttcagatgttatcccttatgggagtaatttgtaaattctagcttcttcgggtggggggaggcggggtgtgtgtgtgtgtgtgtgtgtgtgtgtgtgtgtgtattatttatttatttttttaagttaattggcctcttccagcaaagagtatacagcagagacctagaagtttcattttttgtttgtttttgttttgttttgttttgtttttgagacggagtctggctctgtcacccaggctggagtgcaatggtgtgatctcttctcactgcaacctctgcctcccgggttcaagcaattttcctacctcagcctcccaagtagctgggactgcaggcgcgcgccaccacgcccagctaatttttgtatttttagtagagatggggtttcaccattttggccaggatggtttccaactcttgacctcgtgatctgccaccttggcctcccaaagtgctggaattacaggtgtgagccacggctcctggccaagacctagaagttttacgtcaaattttgtctctgcagttttctgaggaatgagtatatgtgctcaaataatagctaagtattaagtctgaaatattctagaaaaacagtcacaaagtagttatgcctaggatgtttttgaatattggtactagaacaaatggattcctactagatttcctttttactttcatattcagatgtaggaagagttggaattcaaaatgtgaaaagcagtcttgaatctcagtaaattcttaagaaattcttaattcattgaagagccattggtcgtgtgtgttttttggggagtgtgtgtgtgtgttgttgttgttaagaattcggggatgagtatgaggctatcattgcttctacaaggcaacttaatgatagtttgctgcttggcacaacaggtgaaagggcctttctagagcagggatcttggtttccctttttcccacctagtagtatcattccatgtatttaccaggatatacattgtttagtcctgtcttggctaaataggtaatggtccttaaggacataaaatggaaggatattgtgcagaagaattactagttctccgtagtgtatttttttactgtattctcctcatcaacagatggaaaatttttaaacttagaagaaaaaacaagtgtttttctccaaaagattgagaaccactgcttttaagttattaatggaggtcttcaatggatttgttaaaaatctggagcatggattttttttttttaatttttttgttattggttactgagtattggaaaaggaaatacagtattcaaaaacagtaatgttcaggatttggaactattttactcaggaaaaaataagtttataaatagacattttaatgaaaaggaaaatagcaaatttatggaaatctgagatagtctgtgttttgcttcactctgtttagtgctagaattctggactttgtttggggtcaaactctgatatgacaggaaaactaacagatgattaaaagagacagtaacataaatgggaaagtttaaatatggtatatggttttaattatattttgtataagaaagcagtttataccagttgtattcctaactaaaaagtactattttatcagtttcctgggactaatttattataagttaattaatgacatgagcattttggcccaaatacagttgaaatgttcattgaaactggatcaaagatgagcatatgtgtcaaggctttaaaatcatttttcatattaagatttccagagaaagtttttgtaatatataagttaaatatttttaatgctttagatgacaggaactgttgaaggtcctggatctcataacaagccactagctagctgatccaaagacatttggccccatgggcttctaggaagacaaatgtgcttaccatttcaaagattttattttgctcagtaacctactagacatatattagtgtttgtttgagttggtcgttgtcttccattgctgttattttattattattatttttttaattttagagacaggatctccttgtcacccaggctggagtgcagtggcacagtcatagctcactgcagtctcaactcttaattaggctcaagggatcgggatcctcccacctcagcctcttaaatagcttggactacaggtatgcaccaccactcctggctgtcttattgtgttgcccagggtggcctcaaaactcctggcctcaagtgattctcctaagtcagcctcccaaagcgctaggatacaggtgtgagccaccctgcccagccccattgctgttgaacttttttttttttttaaagacaggctctggttctgttgcccaggctggagtgcagcagcgcaatctcagttcactgcaagccacccaccgagctcaagccatcctcccacctcagcctcctgagtagctgggactataggtgtgcaccaccatgcctggctactttctttgtaatttttttgtggttcaaataggaatcttccacgtgcatccaaaatatttttggtttgtgacactcagtgttattattgactcatttttccattggaaggtgtgcctcagagtgggtgagcctttttgccctcagtcttctgtcagcactctaagactccaagtactctaagagattgctcactaaaaataagaacagctggccatctacctcaaatgtgagccgtcacttttgtgatataatcagtccttatctttagtacacagatttatggaatatcacactcactgtctgcctgctttggggtgtttctcctgtgtcattcatttttgtatattggcatatagcaaatataggaatgctgtgtcgcagctgtgggtcatgtatgtacttgcagttagctcttgctcccaagaatgcaagaaatttatcaacaaactcgtgtcataaaaatagtttacagtgatttttttcttaaaatatttcaatgattaagactttttttaataaccacaagtgtataattgtaaaacctaagcattactcagcaaatctagcaattgttgaattgcataagcttcttgttcattggaacttttgctaaagaattatgacctttgatttcttatcaccatgacctatcattatgataaacatgcccctcttatgtatccttatacccattataaggataaacaagggatagctccacccaccagatgtcatagacacaactggtattttggggattttgctgtagactaatcctggaaggaagagaggttatagataaaataagattggccatgaattgattgttgattaaagctgggtagggaacattgggttttctctggttttatatttatttgaagtttttcaccataaagttttttttttttaagataaaaaataaaagcatgaatagtgtaaacaaagttttgaaggagaaggaaacaggttagtagctaattaacaaaaatgttcttgttccattcaggcacaggagtttggactagcccaataagcattaaggaaaccattatttgtagatttcagataatgcaatgatagtaaccaaagttatgctctagaagggataacatcatggaagaatatagagtagattggagggttcacaccccagaggtagtgagaccagttcactgctattatataatgctaccttgaaatcatagggaggcgactgatgtggtttgctaaaagtctccaaaaatttcaaaggagaatagctcttcagtcaggtgctagtgccagcacaacaaaaaagagggttttttccctcatttggccagggcatggatttggaccatgtgggtgtcataatggagtataccaagtgattttgttcctatgatgaaagtgaagtccatattttgtctcctgtcttttagtaaatcagtatagataagtcttttttttttttttccccccgagacggagtctcgctctatcgcccaggctggagtgcagtggcgtgatctccactcactgcgagctccgcctcccgggttcacgccattctcctgcctcagcctcccaagtagctgagactacaggcgcccaccaccatgcccagctaatttttcgtatttttagtagagacggggtttcaccatgttagccaggatggtctcgatctcctgacctcgtgatccgcccgcctcggcctcccaaagtgctgggattataggcgggatccactgcgcctggccaagtctttttttttttttaattattttattctttatttttttccccacatattctaaaataagtctcttacagtgtctaggtttctttccaaaggtgattaaaaatgaagcatcatattttaaacttctgaggcagaactgctagaacaagagttttgttttttttttttttttgagacggagtcttgctctgtcgcacaggctggagtgcagtggcgcgatctcggctcactgcaggctccgcctcccgggttcacgccattctcctgcctcagcctcccgaatagctgggactacaggcgcctgccaccgctcccggctaattttttttttttttgtatttttagtagagacggagtttcaccgtgttagccacgatggtctcgatctcctgaccttgtgatcctcccgcctcggcttcccaaagtgctagaacagagttttgataatttgtttgaaacgaagcactcaaatcttctagtttatttgcatttgcagtcagacctctacagatgccagctagattacagatggctagcataagtttttttcattacagaaagaagaaatttagagcttagtgcggtctattaaaagaattaaaggttatgtcaaaggacaactataagaaagtactttggttctgaatattgcttcagctagggtttattttgaagctcctagcccaaatttgtagaaatgcaactaagatctaatatttagtgtgtaagaactttacaggacatccagtcagtagtagtcttaaaagtgaatcacataggctgaagcaggcagatcacctgagcccaggagttcaagaccaccctggccaacatggtgaaaccccgtctctactaaaaatacaataatcagctgggtgtggtggtgggcacctataatcccagctactcaggaggctgagacaagagaattgcttgaacccgggaggtggaggttgcagtgagctgagatcctgccattgcactccagcctgagcaacaagagcgaaactccgtctcaaaaaaaaaaaaatgtgaatcacatacataaacattgggaatttgcagataactttcattttagggtttctagagcgcagtggtgtaatcttggctcactgcaacctccacctcctggattcaagcgattctcctgcctcagcctcccaagtagctgggattacaggtgtccaccactatgcctggctgatttttgtatttttagtagagacggggtttcatcatcttggccaggctggtctcaaactcctgacctcaggtgatccacccgccttggcctcccaaagtgctgggattgcaggcatgagccaccacacccggcccacttacaggatttttctcccccttcatggttgtataaatgcagtacttggcacataggcaaacctgaacagtttgcaagttgcctacccttttctactttggataaaataaacctcttaaaatagcacttaacatagtaatatatgtatattaatagtagttacttcatgtttgttgaatgaatgaatgaaaaaagtagcaaatctacataatataaatcccaagacagccaggaattttatctggacctaattgtcttacatagcaccaattggtacttaataaaaacaaggctgggcatggcagtatgcgtctgtggtcccagctacttgggaggctaaggtgagaggatcgcttgagcccaggaggttgaggttgcggtgagctgtgattgcaccaaagcactccaacctgagtgacagaccctgtctcaaaaataaaaataaaaacaattagttataactcagatgttgctatctaaggtaagtagtaattactataataaacaagctatatattaacatcttaattttctttcctctgaactttactactgtaggtgtgtagtgaacttcatacaagttaatctttttgtagctctatttcttcatttctgtttgttcatcggttggagaaattttgcttaaattaatgaaagtaaaaatacagatattaatggctcataaatgtgcacaacccacttcatctatagtaagtaaaagtggctcccattttggggtttgaaaatgaagaagatctgaattcacagagaggaggcacgtgtagagatatgagaagttcttttcctactctactttggtacattggtctctaacacatgttctgagcctcagaacacagtagaacagaaccttcagaaagtgttgagagtataactctttaaagaggtttagtcagtctaaattatttgagggcatcatctttatttggtacttagaagtctaaaatcttcctgattgttgttaaggttacaaagagtctgtgtattgttggttagttgagcagtaaatacctttttatcattgttaaatgggttgtaaataaaatatttttcttcagtgttaaaataatttatgatcacaatatttagataataataataataattctgttatttatgatatgtagtcttatcctactgccactcccctcttctgctccacatactactaagtatgacttggtctctataatacgcactaattatgaagttttttacggagaaggaaattcttaatatagactaggattttttttcagttgtcttttaatggccttttattctagtaaacttagatttcttatagacatcggtttattgtgccgagctcagtagctcctagagggagtataaatttaggcaaaggaatcaaggaataaactggtattgtagaagagatgggagaaaaggaaatttttatttttgctttaaattactaaatcatgatgtttcctgtctctcagtgcttaccccaatcagtgtttctctcttttcttttttcctttcagtcccgaacccctaaaattctttgcttgcattaacttgcttcagattataagcctaattttactgttccaaatacatgaacttttcactgtatctccaagtgctcttttagagttcatctctttgttttccagtaactcatatttgtttcttcttatgcttaacacttctctctcatttttttttttcatgtttctcacattttttctttccacattatctgctgtagcaaacttgaaatatatgcttttggagaagagtaaaaacagtgtttagccatattcaggttattagcagcagctcctctttcttcacatatacttaaagggaccagaaagttatttaagctcttacttgctacaaatgctgttccatgtgctcctatgagtcagcacaacaggtattttttttttttttattgtacagatgagaaaactgagactttgagacattctatgaattgcctgagctagttggcagcagtgccaggattcatagaaatttggagcaggaagacaacacaatgaagattttactttgaggaatttagggttcatctatgtaaagtgatttttctgaggtcactaattatgttgtaggctagaactcaagtctcctaactcctaatatagtgccttttttttcttttctttttttatttttttaggagatgggtctcactatgttgcccaggctggtcttaaactcctgggctcaagcaatcctcctgcctcagcctcccaaagtgctaggattacaggtgcaagccaccgcacctggcctctaagagtgctttttcctagcatacttttcttctcctaaggtaaaaggctgtttgtcatggtacagctacggtgattttacttgagatatttgactttgagatggagatgaagataagtatataatgcagctgccacattcattctcatacaaggtaaagtcattcaaaagataaatcgaagaactatagatgtatttaagaagaaattcagcctatatgtaacaacaaaattttgaataatcaagttcagaaattggatttttaaaaacttattagctactttaacccttttgaaatattcccaaaaagtgttttctcttcctgagttaaatttattcatttattgacctattaaagatttttttagtgcttcagagctattctgtatatctgttcattttcgttatttagtagtatatagaagtaatagattgggctgaatagatttatttcaggatatatcttagatatttgtgttttttcatgaatcccagtttaagggttattgctttcaaaaggaagaaatttggttagtcatgacttttggctagttgaagtttagagaagtgctttatacaggatcttttatttagtgagaaaaaaataactttttataattttataatactgtgtgaaaaacctgataccaaaacttctgaaaaagaaaccaggcctaggagatgaggattctagggaagattattaaattgaggatatttttaagttagattctaaattagtaaatcgtggctaataagatgaaaataatctgatcctttagtaagatctgaagtaatattgttgccctgcaaaaaagtggttgttatcagcataccttatatgtcagcctaagcaagattagattttctcttttctctgatagatgccaatatttaacattgacttttatctactttcaaaaatatctatgaaatatactttctgtctctgaattagagtgtatgtatatttgtgtttacttgaaatgttatagctggatgatagatttcagagcagtttttatgcttagggaagccactgcctcccaaaaaggttttcttatgagaatgaggaaaataagtataaattttcatatttatgttattactattgatgtgcttggataattgtatttataaaagtaaaaaatgttcagtattttatctgaaatttaataatggatattgtacagcctaaggaattaaaagaaaaaggaccctttgagaaaatggcttgttcttatgtatcttaatatatactgtgttcactttatgttttgtcagacactgaaattgaggaagagagattttggcgttctgttggtttatggagagagttgatcagagattgctccttggctgagttgctgtctgcataggctgttaacaattgtttctctggcagcagatcttgttcatcaggattgcatcatttctgggagaatggccaaggtccacagcctcaatacaaagactgtctgaagcatatgaggcctgttctctttctgaagcggcactcctcttcctgccagtcctcttcacaggattactgaagcagacttgttctgaatttctttcgttggattggttgtttattggacttttgtctgccagctgcttccgcctcacctgtctgatgcaatttcttcttctgaaatctgttggaattgttcataaaacactttttgtttgtcttctctgtgagtgaccagggagatcatacaggtcttgtgctttcagcaagtcatatagagaagagactgtcagaatgatgatacagagactgttggccatttctgaaaccaattaaaaagatggggtaattaagaaacatttctggcatgttctatttaacatccttttccctagaaactgtatgtaaatggcacctcctaaagagagtactcggtactactggaagatacaggctgtgtctgtttctgaatccaagaacttactagtgttcctgtggattctgatggattgttctggaaatagttaaattaataataaattgaaactgtgatgcattcatttaccccctactgtacactcacatctatttcgctgttttcctcctttcctttttttctttcttatttgctattgcttcttccttgatttactttatttcttccttccttttactgttactttgatacttttatttctctaattctgggtgtactattttaaatcgtttctaaaaaatagtttattttccagttttttaaaattagaaatcataaaacatcaacataaatgaaatgcatgcgttctaatgcttggtaactggaatcctatgaatagctcttttcatgtttatgatatgttaatctttaaggtgttaataactctggctagcgttaaatttgacttttaggaaaaaacaccagagacttaaaggatactgatcattttcccttcctttttggaaggtagaaaattaatttaagcgccattttttaagcatgtttccatttgaccgcaaatagaactgactcctttttatcactcttttttatagtaggacaagaaactagatggtgtggaatgaagggaaagaaaggagtaataaatatggacttgtaatttaatgggtgatgatggccccttgtctggctggacagttgtcggacatcgggttaaagaaagaactctgaatttgagaagtgttcagtgaagaagggaagcaccttttaggagagagaaaaagaagggatcccttggaaaatgagataattctaatttgaaggaagaggaaaaattagccagtgacataagtatttaccatttaagtcaaataatttccttctctaccatctcgtttctggctttatggaaaaataaaaaattaaagggcaaaaaattcagtgccggatggacgtagggtggtaaacgagatagtatagatgtaggatgataaacaagacagtatacagaaacataatatagctgtagaattccattctgtgtgttcatcaatgttatttctttctgtactaatttttgtctcaactttttctaggtcttcagaactactagcagataatttggggggacttcatattcagaagtctatataaaggtgactgacccaagtaaatccttttaatttctgttttattttttgcattttaatgactgctggaatcatgttgtagtaaattgtgattataatttacttagcagatatttctggaacttctctacgtgtcagttattgttttggccattgaaactacagcagtggataaaaatccctgttctcatagagtttatattctggtaggaaaaaacaaacaaattataataagaaaatactgcatttagatgatctgttaaatgttcctcggttaacattttaatagctacattttacagagttacttagggaaggaactattcttagggtaatatttgagaaatttgggattattaacagaatttgaattaagaagcctcatcattattaaagcattagttagaatgagatggtcaagctaacctattatggttgctttcatcagaagaatgaaacagtcatgttaaactagacacaaggaaaatggaataatttttatgaaatagaaatttatagttaccgacaatgtttctttttttttttttttttttttttgagacagagtatcattcttgttgtccatgttgaagtgcaatggtacagtcttgactcactgcaacctccggctcccgggttcaagcgattctcttgcctcagcctcccaagtagctgggattacaggcgtccgccatcgtgcccggctaatttttttgtatttttagtagagacagggtttcaccgtgttagccaggctggtcttaaactcctgacctcaggtgatccgcccacctcagcctcccaaagtgttggaattacaagcgtgagccactgcaccgggctgacttaatgtttcttaaggattcatcaactatccaaaatagctgggttggtgtttcattagtgaatgtagcaatcatttattcactcattaagatgttatctgaagtaacttttccatcttttccttttagtatatcttttaaaaattgctctaggaaaaatatcaactatcatcttgggtttataacttgtcttttatctagaaactgtactttttttttttttttttttggagaaagagtttcacttttgctcaggctggagtgcagtggccctgtctcagctcactgcagtctctgcttcccagattcaaacgattctcgtgcctcagcctcccaagtagctgggatcacaggcatatgccaacatgcccagctaatttttgtatttttagtagagatagggtttcaccgtgaaaccatgcattttttaaatgggtgtacagtcgtaatggctacaacaaagggtttttaatgatattaagtacggtttttggtttaagtcttttactgaaaatataaaacaattcagattccctttgctgatcaggggaggtacggtgataatcagactttcatatgattatctggtcagacagctttggggcttttcttttaatctgaattatacagtaagactaatagaaagagtagtgaccaacagcccccagtatttaactgtcttttgggtttacttgatgagtgttcttgttttatcatttacagattttacttcaatttcccaaaggcttagaagatgtactgccaaggtctctgtttggatatactgttagggaaaggaaacatacatgtgtaagactggcctaaaggcaaaaaagttcatcagtccctttttttttttttttttttttttttttttttttttttttggcaacagggactcactttgttgcccaggctgagtgcagtggcatgatctcagctcactgcaacctccacctcccaggctcaagcaatcctcccacctcagcctcttgagttagctgggactacaggtgcatgccaccacaccagatttattttttttttttgagatggagtctcactctgtcgcccaagctggagtgcagtggcgtgatctcggctcactgcaacctccacctcctgggttcaagagattctcctgcctcagcctcctgagtagctgggattaccagcgtgtgccactacagctaatttttgtgtttttagtagagaaggggtttcaccacattggccaggctggtctcgaattcctgacctcaagtgatccacccaccttggcctcccaaaatgctgggattacaggtgtgagccaccgcgcctggcgcacaccaggtaaattttgtatttttagtagagacaggatctcgccatgtttcccaggctggtctcgaactcccaagctcaagcaatccacctgcctcagcctcccaaagtgctgggatgacaggaatgagccacttcatctggcccagtcatttcccagcccagctatatgtcacctccaattgggtgtaggaacaggcgtattgtcatacccagaggtctcacttcatcatctaggctggagtgcagtgcatgattatggctcacctcagcctctacctcctgtgctcaggtgatcctcccacctcagctcccaagtagctgggaccacaggcacacatcaccatggctggctgatatttttttactatttttgtagagttggggtctcactatgttgtctcagctggtctcaaattcctggactcaagtgatccttccaccttggcctcctaaagtgttggtattacagttgtgaaccactgcacccagcccacaattttttttatttgcattaatatcaaagtaagattggagcatctcagaccatctaccatttacaatttacattaaccggccaggcacggtggctcacgcctatagtcctagcactttgagaggctgaggtgtgagtggatcaccggaggtcaggagttcaagaccgcctggccaacatagtgaaacttcatctctactaaaagtacaaaaattagccagacatggtggcaggcgcctgtaatcctaactacttgggaagctgaggcaggagaatctcttgaagccaggaggcggaggttgtagtgagccaagattgcgccattacacttcagtctgggcaacaaaagtgaaactgtctcaaaaaataaaaataaaatttacattaaccccctgggttgactcagtcggtatcatgtacttttcattcctttagtttttttagtattaataattgttctaatgtcttattatgaatcagtgtatcagtcatgactctctttgtagtcttttttgcaaaagtccttgttaacatgggtctttgacattcacattgactttattcccccccaaataaaatgctttttgtttcatcctttcaatgttttttacactactgtaaaactactaatgtaaagtcacacaaagaacacttgtttccctctgcaccatacctccaaatctcttaatctatttttgcatttttttatacttcagtaatttctgagtctttctgttcccagctttcactggtttatggtcaccatgtcaagctatcctcaccgctttttcatacacagttgtttagtctttatcatgaaactgtactcttcgtgatttcgggggtttttttgttgtttttaaaaagtagtcaacttttttagagcagttttaggttcacaggaaaattcatcaggagatacagagatttcccatgcaccctctgcacccacgcatgcatagcctcctcctggtttatatttttgttcatatctagcagcgtattattaccccacaaataaagttgctaagatgattgcatcttctcccaaaattatagttaagatgatttaaaagaaggaagagagtgttcaatgacaaaagaaggcactaagaaacagctgtttccaatcaagtataaacaacaaattgatctcttttaatttggaagaaataacattattgactgcttgtgaaactgcatttatttgtggcctaggaaaaaaacttaaatgaagatcttgaatttttaaagagtttaggtaaactgggatatttttaataaccatcctttatcttaaaacttgtttgctatatcctaggctgccagaaaattttgtttgggcagttttagaatggggagaatgtgttggttagtgagataggcagactcttcctttcccttcaactgaaaagaaaaacaaaagtaaacataactttttgccccctactttgtgaaacattaatgaaatgcatagtaaacatgggacactgtggctgtatttattttataattatcccttaaaagccttattcaagaatgcagaaaaatattcagtaacatttaagataaacttgaagaactatctgataactaggtatttattttactagatattttccttttctgttacaggattcctcatgtccataacatgttggatgaggctctgcagctcacccccactctcagagtggtcagtctccattaattggaccccgtgatttccaatctctgctgtgttggacgtcatgagcattgcaatccctctgggagtcaccacatcagatacatcctactcagatatggctgctggatcagagtaagtgctactttctaggtagtaggtacattatcagtctgtgtggagacagccttcttatggatagctaataggataatatgtagtattttcttaaccagatcctattccactgtaattaacattagacctttccctttacccccattgaaggtggtggaaaaaaggaattagaaggggaaggaagagttttcagaggggtatttctgggcaaataattaatagaaccaaagttgcaaagtaggaattcattttcatttgttttaatgggtggagaaaattggaataaagtaggtgttactacctgcttctgtagagttaatgattctgatggagggagataagaaggtgttctttccaactgattttccttgaagtcctcttcctatgtacttcccattgttctagagtaaaggggccgaaactatatgggcaggttgcctagaccttctgacatctggggtagaaaacatggagaacagcgtcatctgtttttttataatattcgttgcctagaaagaggaccttcaaaatcagtggtaccaaacttttttttcagctaagagcagctttaggaattcagagtttgtccaaaggcccaatccctaaaattatactctcaattcttgaagaatgtaaatgccaaatgacaatgaaggtaggccttcattatacaactttatatatattattcacagttttaaaatttttagtcttttgtatcccttctcttttaagttgtccgagattccccctgctcacagattccccctcttgtccttttacctcccttgtacccaatcttccttgcttacagaaaggaagtggaagccccctacctttcaagacgaagtggcactacaccaggatgtgaaagtccagcgaaagagacccaaggggcctagggggcagcacacccccagaagccaagtctattccaggcagtaccagggattagggtctgggctggaaaaatcctggtgttttgaatatgttcaggtccagttcagactcttgatcccacagccacttcttgagtgaggtgggtgttgctctaattcccctgtttctcttgccattttcacagtccctggggattcttcccccttcagcaaagcaaagcaactgtaccagatttctgggttgaatgacatccctgattaataagtggttttcttccttaaaacagaatattattaaagagcatgtatatttcttcataaagccacctaatataacttacctgtttactgagttccttaaagaggaagacttaaagctaccctgagaaatagtatataatattctggggtagtctaaaatgaaaagcagtgtttgggcttattcccatataaaaaggagaaaggagggttgggggtggggaagggttgattttgtttcttctagagcttttttcttcttttgtttttgtttgttttgttttgtttgcatgcaaaaggtatttagttatgtcagtaactgagacttacttaaccattttacaactctttccccaaataaagtacttaaaactctccctgcattagtaggtagccagtttgtattgtgtttataggtttttataaagtcagctactaacctggtactatgtagattgtctaactgtatagatagatagcattaacatttg

SEQ ID NO: 370 - DNA, 32765 bp, Homo sapiens; identical to SEQ ID NO: 369
  source 1..32765: mol_type = genomic DNA

SEQ ID NO: 371 - DNA, 32765 bp, Homo sapiens
  source 1..32765: mol_type = genomic DNA
tcccacctcagcctcttaaatagcttggactacaggtatgcaccaccactcctggctgtcttattgtgttgcccagggtggcctcaaaactcctggcctcaagtgattctcctaagtcagcctcccaaagcgctaggatacaggtgtgagccaccctgcccagccccattgctgttgaacttttttttttttttaaagacaggctctggttctgttgcccaggctggagtgcagcagcgcaatctcagttcactgcaagccacccaccgagctcaagccatcctcccacctcagcctcctgagtagctgggactataggtgtgcaccaccatgcctggctactttctttgtaatttttttgtggttcaaataggaatcttccacgtgcatccaaaatatttttggtttgtgacactcagtgttattattgactcatttttccattggaaggtgtgcctcagagtgggtgagcctttttgccctcagtcttctgtcagcactctaagactccaagtactctaagagattgctcactaaaaataagaacagctggccatctacctcaaatgtgagccgtcacttttgtgatataatcagtccttatctttagtacacagatttatggaatatcacactcactgtctgcctgctttggggtgtttctcctgtgtcattcatttttgtatattggcatatagcaaatataggaatgctgtgtcgcagctgtgggtcatgtatgtacttgcagttagctcttgctcccaagaatgcaagaaatttatcaacaaactcgtgtcataaaaatagtttacagtgatttttttcttaaaatatttcaatgattaagactttttttaataaccacaagtgtataattgtaaaacctaagcattactcagcaaatctagcaattgttgaattgcataagcttcttgttcattggaacttttgctaaagaattatgacctttgatttcttatcaccatgacctatcattatgataaacatgcccctcttatgtatccttatacccattataaggataaacaagggatagctccacccaccagatgtcatagacacaactggtattttggggattttgctgtagactaatcctggaaggaagagaggttatagataaaataagattggccatgaattgattgttgattaaagctgggtagggaacattgggttttctctggttttatatttatttgaagtttttcaccataaagttttttttttttaagataaaaaataaaagcatgaatagtgtaaacaaagttttgaaggagaaggaaacaggttagtagctaattaacaaaaatgttcttgttccattcaggcacaggagtttggactagcccaataagcattaaggaaaccattatttgtagatttcagataatgcaatgatagtaaccaaagttatgctctagaagggataacatcatggaagaatatagagtagattggagggttcacaccccagaggtagtgagaccagttcactgctattatataatgctaccttgaaatcatagggaggcgactgatgtggtttgctaaaagtctccaaaaatttcaaaggagaatagctcttcagtcaggtgctagtgccagcacaacaaaaaagagggttttttccctcatttggccagggcatggatttggaccatgtgggtgtcataatggagtataccaagtgattttgttcctatgatgaaagtgaagtccatattttgtctcctgtcttttagtaaatcagtatagataagtcttttttttttttttccccccgagacggagtctcgctctatcgcccaggctggagtgcagtggcgtgatctccactcactgcgagctccgcctcccgggttcacgccattctcctgcctcagcctcccaagtagctgagactacaggcgcccaccaccatgcccagctaatttttcgtatttttagtagagacggggtttcaccatgttagccaggatggtctcgatctcctgacctcgtgatccgcccgcctcggcctcccaaagtgctgggattataggcgggatccactgcgcctggccaagtctttttttttttttaattattttattctttatttttttccccacatattctaaaataagtctcttacagtgtctaggtttctttccaaaggtgattaaaaatgaagcatcatattttaaacttctgaggcagaactgctagaacaagagttttgttttttttttttttttgagacggagtcttgctctgtcgcacaggctggagtgcagtggcgcgatctcggctcactgcaggctccgcctcccgggttcacgccattctcctgcctcagcctcccgaatagctgggactacaggcgcctgccaccgctcccggctaattttttttttttttgtatttttagtagagacggagtttcaccgtgttagccacgatggtctcgatctcctgaccttgtgatcctcccgcctcggcttcccaaagtgctagaacagagttttgataatttgtttgaaacgaagcactcaaatcttctagtttatttgcatttgcagtcagacctctacagatgccagctagattacagatggctagcataagtttttttcattacagaaagaagaaatttagagcttagtgcggtctattaaaagaattaaaggttatgtcaaaggacaactataagaaagtactttggttctgaatattgcttcagctagggtttattttgaagctcctagcccaaatttgtagaaatgcaactaagatctaatatttagtgtgtaagaactttacaggacatccagtcagtagtagtcttaaaagtgaatcacataggctgaagcaggcagatcacctgagcccaggagttcaagaccaccctggccaacatggtgaaaccccgtctctactaaaaatacaataatcagctgggtgtggtggtgggcacctataatcccagctactcaggaggctgagacaagagaattgcttgaacccgggaggtggaggttgcagtgagctgagatcctgccattgcactccagcctgagcaacaagagcgaaactccgtctcaaaaaaaaaaaaatgtgaatcacatacataaacattgggaatttgcagataactttcattttagggtttctagagcgcagtggtgtaatcttggctcactgcaacctccacctcctggattcaagcgattctcctgcctcagcctcccaagtagctgggattacaggtgtccaccactatgcctggctgatttttgtatttttagtagagacggggtttcatcatcttggccaggctggtctcaaactcctgacctcaggtgatccacccgccttggcctcccaaagtgctgggattgcaggcatgagccaccacacccggcccacttacaggatttttctcccccttcatggttgtataaatgcagtacttggcacataggcaaacctgaacagtttgcaagttgcctacccttttctactttggataaaataaacctcttaaaatagcacttaacatagtaatatatgtatattaatagtagttacttcatgtttgttgaatgaatgaatgaaaaaagtagcaaatctacataatataaatcccaagacagccaggaattttatctggacctaattgtcttacatagcaccaattggtacttaataaaaacaaggctgggcatggcagtatgcgtctgtggtcccagctacttgggaggctaaggtgagaggatcgcttgagcccaggaggttgaggttgcggtgagctgtgattgcaccaaagcactccaacctgagtgacagaccctgtctcaaaaataaaaataaaaacaattagttataactcagatgttgctatctaaggtaagtagtaattactataataaacaagctatatattaacatcttaattttctttcctctgaactttactactgtaggtgtgtagtgaacttcatacaagttaatctttttgtagctctatttcttcatttctgtttgttcatcggttggagaaattttgcttaaattaatgaaagtaaaaatacagatattaatggctcataaatgtgcacaacccacttcatctatagtaagtaaaagtggctcccattttggggtttgaaaatgaagaagatctgaattcacagagaggaggcacgtgtagagatatgagaagttcttttcctactctactttggtacattggtctctaacacatgttctgagcctcagaacacagtagaacagaaccttcagaaagtgttgagagtataactctttaaagaggtttagtcagtctaaattatttgagggcatcatctttatttggtacttagaagtctaaaatcttcctgattgttgttaaggttacaaagagtctgtgtattgttggttagttgagcagtaaatacctttttatcattgttaaatgggttgtaaataaaatatttttcttcagtgttaaaataatttatgatcacaatatttagataataataataataattctgttatttatgatatgtagtcttatcctactgccactcccctcttctgctccacatactactaagtatgacttggtctctataatacgcactaattatgaagttttttacggagaaggaaattcttaatatagactaggattttttttcagttgtcttttaatggccttttattctagtaaacttagatttcttatagacatcggtttattgtgccgagctcagtagctcctagagggagtataaatttaggcaaaggaatcaaggaataaactggtattgtagaagagatgggagaaaaggaaatttttatttttgctttaaattactaaatcatgatgtttcctgtctctcagtgcttaccccaatcagtgtttctctcttttcttttttcctttcagtcccgaacccctaaaattctttgcttgcattaacttgcttcagattataagcctaattttactgttccaaatacatgaacttttcactgtatctccaagtgctcttttagagttcatctctttgttttccagtaactcatatttgtttcttcttatgcttaacacttctctctcatttttttttttcatgtttctcacattttttctttccacattatctgctgtagcaaacttgaaatatatgcttttggagaagagtaaaaacagtgtttagccatattcaggttattagcagcagctcctctttcttcacatatacttaaagggaccagaaagttatttaagctcttacttgctacaaatgctgttccatgtgctcctatgagtcagcacaacaggtattttttttttttttattgtacagatgagaaaactgagactttgagacattctatgaattgcctgagctagttggcagcagtgccaggattcatagaaatttggagcaggaagacaacacaatgaagattttactttgaggaatttagggttcatctatgtaaagtgatttttctgaggtcactaattatgttgtaggctagaactcaagtctcctaactcctaatatagtgccttttttttcttttctttttttatttttttaggagatgggtctcactatgttgcccaggctggtcttaaactcctgggctcaagcaatcctcctgcctcagcctcccaaagtgctaggattacaggtgcaagccaccgcacctggcctctaagagtgctttttcctagcatacttttcttctcctaaggtaaaaggctgtttgtcatggtacagctacggtgattttacttgagatatttgactttgagatggagatgaagataagtatataatgcagctgccacattcattctcatacaaggtaaagtcattcaaaagataaatcgaagaactatagatgtatttaagaagaaattcagcctatatgtaacaacaaaattttgaataatcaagttcagaaattggatttttaaaaacttattagctactttaacccttttgaaatattcccaaaaagtgttttctcttcctgagttaaatttattcatttattgacctattaaagatttttttagtgcttcagagctattctgtatatctgttcattttcgttatttagtagtatatagaagtaatagattgggctgaatagatttatttcaggatatatcttagatatttgtgttttttcatgaatcccagtttaagggttattgctttcaaaaggaagaaatttggttagtcatgacttttggctagttgaagtttagagaagtgctttatacaggatcttttatttagtgagaaaaaaataactttttataattttataatactgtgtgaaaaacctgataccaaaacttctgaaaaagaaaccaggcctaggagatgaggattctagggaagattattaaattgaggatatttttaagttagattctaaattagtaaatcgtggctaataagatgaaaataatctgatcctttagtaagatctgaagtaatattgttgccctgcaaaaaagtggttgttatcagcataccttatatgtcagcctaagcaagattagattttctcttttctctgatagatgccaatatttaacattgacttttatctactttcaaaaatatctatgaaatatactttctgtctctgaattagagtgtatgtatatttgtgtttacttgaaatgttatagctggatgatagatttcagagcagtttttatgcttagggaagccactgcctcccaaaaaggttttcttatgagaatgaggaaaataagtataaattttcatatttatgttattactattgatgtgcttggataattgtatttataaaagtaaaaaatgttcagtattttatctgaaatttaataatggatattgtacagcctaaggaattaaaagaaaaaggaccctttgagaaaatggcttgttcttatgtatcttaatatatactgtgttcactttatgttttgtcagacactgaaattgaggaagagagattttggcgttctgttggtttatggagagagttgatcagagattgctccttggctgagttgctgtctgcataggctgttaacaattgtttctctggcagcagatcttgttcatcaggattgcatcatttctgggagaatggccaaggtccacagcctcaatacaaagactgtctgaagcatatgaggcctgttctctttctgaagcggcactcctcttcctgccagtcctcttcacaggattactgaagcagacttgttctgaatttctttcgttggattggttgtttattggacttttgtctgccagctgcttccgcctcacctgtctgatgcaatttcttcttctgaaatctgttggaattgttcataaaacactttttgtttgtcttctctgtgagtgaccagggagatcatacaggtcttgtgctttcagcaagtcatatagagaagagactgtcagaatgatgatacagagactgttggccatttctgaaaccaattaaaaagatggggtaattaagaaacatttctggcatgttctatttaacatccttttccctagaaactgtatgtaaatggcacctcctaaagagagtactcggtactactggaagatacaggctgtgtctgtttctgaatccaagaacttactagtgttcctgtggattctgatggattgttctggaaatagttaaattaataataaattgaaactgtgatgcattcatttaccccctactgtacactcacatctatttcgctgttttcctcctttcctttttttctttcttatttgctattgcttcttccttgatttactttatttcttccttccttttactgttactttgatacttttatttctctaattctgggtgtactattttaaatcgtttctaaaaaatagtttattttccagttttttaaaattagaaatcataaaacatcaacataaatgaaatgcatgcgttctaatgcttggtaactggaatcctatgaatagctcttttcatgtttatgatatgttaatctttaaggtgttaataactctggctagcgttaaatttgacttttaggaaaaaacaccagagacttaaaggatactgatcattttcccttcctttttggaaggtagaaaattaatttaagcgccattttttaagcatgtttccatttgaccgcaaatagaactgactcctttttatcactcttttttatagtaggacaagaaactagatggtgtggaatgaagggaaagaaaggagtaataaatatggacttgtaatttaatgggtgatgatggccccttgtctggctggacagttgtcggacatcgggttaaagaaagaactctgaatttgagaagtgttcagtgaagaagggaagcaccttttaggagagagaaaaagaagggatcccttggaaaatgagataattctaatttgaaggaagaggaaaaattagccagtgacataagtatttaccatttaagtcaaataatttccttctctaccatctcgtttctggctttatggaaaaataaaaaattaaagggcaaaaaattcagtgccggatggacgtagggtggtaaacgagatagtatagatgtaggatgataaacaagacagtatacagaaacataatatagctgtagaattccattctgtgtgttcatcaatgttatttctttctgtactaatttttgtctcaactttttctaggtcttcagaactactagcagataatttggggggacttcatattcagaagtctatataaaggtgactgacccaagtaaatccttttaatttctgttttattttttgcattttaatgactgctggaatcatgttgtagtaaattgtgattataatttacttagcagatatttctggaacttctctacgtgtcagttattgttttggccattgaaactacagcagtggataaaaatccctgttctcatagagtttatattctggtaggaaaaaacaaacaaattataataagaaaatactgcatttagatgatctgttaaatgttcctcggttaacattttaatagctacattttacagagttacttagggaaggaactattcttagggtaatatttgagaaatttgggattattaacagaatttgaattaagaagcctcatcattattaaagcattagttagaatgagatggtcaagctaacctattatggttgctttcatcagaagaatgaaacagtcatgttaaactagacacaaggaaaatggaataatttttatgaaatagaaatttatagttaccgacaatgtttctttttttttttttttttttttttgagacagagtatcattcttgttgtccatgttgaagtgcaatggtacagtcttgactcactgcaacctccggctcccgggttcaagcgattctcttgcctcagcctcccaagtagctgggattacaggcgtccgccatcgtgcccggctaatttttttgtatttttagtagagacagggtttcaccgtgttagccaggctggtcttaaactcctgacctcaggtgatccgcccacctcagcctcccaaagtgttggaattacaagcgtgagccactgcaccgggctgacttaatgtttcttaaggattcatcaactatccaaaatagctgggttggtgtttcattagtgaatgtagcaatcatttattcactcattaagatgttatctgaagtaacttttccatcttttccttttagtatatcttttaaaaattgctctaggaaaaatatcaactatcatcttgggtttataacttgtcttttatctagaaactgtactttttttttttttttttttggagaaagagtttcacttttgctcaggctggagtgcagtggccctgtctcagctcactgcagtctctgcttcccagattcaaacgattctcgtgcctcagcctcccaagtagctgggatcacaggcatatgccaacatgcccagctaatttttgtatttttagtagagatagggtttcaccgtgaaaccatgcattttttaaatgggtgtacagtcgtaatggctacaacaaagggtttttaatgatattaagtacggtttttggtttaagtcttttactgaaaatataaaacaattcagattccctttgctgatcaggggaggtacggtgataatcagactttcatatgattatctggtcagacagctttggggcttttcttttaatctgaattatacagtaagactaatagaaagagtagtgaccaacagcccccagtatttaactgtcttttgggtttacttgatgagtgttcttgttttatcatttacagattttacttcaatttcccaaaggcttagaagatgtactgccaaggtctctgtttggatatactgttagggaaaggaaacatacatgtgtaagactggcctaaaggcaaaaaagttcatcagtccctttttttttttttttttttttttttttttttttttttttggcaacagggactcactttgttgcccaggctgagtgcagtggcatgatctcagctcactgcaacctccacctcccaggctcaagcaatcctcccacctcagcctcttgagttagctgggactacaggtgcatgccaccacaccagatttattttttttttttgagatggagtctcactctgtcgcccaagctggagtgcagtggcgtgatctcggctcactgcaacctccacctcctgggttcaagagattctcctgcctcagcctcctgagtagctgggattaccagcgtgtgccactacagctaatttttgtgtttttagtagagaaggggtttcaccacattggccaggctggtctcgaattcctgacctcaagtgatccacccaccttggcctcccaaaatgctgggattacaggtgtgagccaccgcgcctggcgcacaccaggtaaattttgtatttttagtagagacaggatctcgccatgtttcccaggctggtctcgaactcccaagctcaagcaatccacctgcctcagcctcccaaagtgctgggatgacaggaatgagccacttcatctggcccagtcatttcccagcccagctatatgtcacctccaattgggtgtaggaacaggcgtattgtcatacccagaggtctcacttcatcatctaggctggagtgcagtgcatgattatggctcacctcagcctctacctcctgtgctcaggtgatcctcccacctcagctcccaagtagctgggaccacaggcacacatcaccatggctggctgatatttttttactatttttgtagagttggggtctcactatgttgtctcagctggtctcaaattcctggactcaagtgatccttccaccttggcctcctaaagtgttggtattacagttgtgaaccactgcacccagcccacaattttttttatttgcattaatatcaaagtaagattggagcatctcagaccatctaccatttacaatttacattaaccggccaggcacggtggctcacgcctatagtcctagcactttgagaggctgaggtgtgagtggatcaccggaggtcaggagttcaagaccgcctggccaacatagtgaaacttcatctctactaaaagtacaaaaattagccagacatggtggcaggcgcctgtaatcctaactacttgggaagctgaggcaggagaatctcttgaagccaggaggcggaggttgtagtgagccaagattgcgccattacacttcagtctgggcaacaaaagtgaaactgtctcaaaaaataaaaataaaatttacattaaccccctgggttgactcagtcggtatcatgtacttttcattcctttagtttttttagtattaataattgttctaatgtcttattatgaatcagtgtatcagtcatgactctctttgtagtcttttttgcaaaagtccttgttaacatgggtctttgacattcacattgactttattcccccccaaataaaatgctttttgtttcatcctttcaatgttttttacactactgtaaaactactaatgtaaagtcacacaaagaacacttgtttccctctgcaccatacctccaaatctcttaatctatttttgcatttttttatacttcagtaatttctgagtctttctgttcccagctttcactggtttatggtcaccatgtcaagctatcctcaccgctttttcatacacagttgtttagtctttatcatgaaactgtactcttcgtgatttcgggggtttttttgttgtttttaaaaagtagtcaacttttttagagcagttttaggttcacaggaaaattcatcaggagatacagagatttcccatgcaccctctgcacccacgcatgcatagcctcctcctggtttatatttttgttcatatctagcagcgtattattaccccacaaataaagttgctaagatgattgcatcttctcccaaaattatagttaagatgatttaaaagaaggaagagagtgttcaatgacaaaagaaggcactaagaaacagctgtttccaatcaagtataaacaacaaattgatctcttttaatttggaagaaataacattattgactgcttgtgaaactgcatttatttgtggcctaggaaaaaaacttaaatgaagatcttgaatttttaaagagtttaggtaaactgggatatttttaataaccatcctttatcttaaaacttgtttgctatatcctaggctgccagaaaattttgtttgggcagttttagaatggggagaatgtgttggttagtgagataggcagactcttcctttcccttcaactgaaaagaaaaacaaaagtaaacataactttttgccccctactttgtgaaacattaatgaaatgcatagtaaacatgggacactgtggctgtatttattttataattatcccttaaaagccttattcaagaatgcagaaaaatattcagtaacatttaagataaacttgaagaactatctgataactaggtatttattttactagatattttccttttctgttacaggattcctcatgtccataacatgttggatgaggctctgcagctcacccccactctcagagtggtcagtctccattaattggaccccgtgatttccaatctctgctgtgttggacgtcatgagcattgcaatccctctgggagtcaccacatcagatacatcctactcagatatggctgctggatcagagtaagtgctactttctaggtagtaggtacattatcagtctgtgtggagacagccttcttatggatagctaataggataatatgtagtattttcttaaccagatcctattccactgtaattaacattagacctttccctttacccccattgaaggtggtggaaaaaaggaattagaaggggaaggaagagttttcagaggggtatttctgggcaaataattaatagaaccaaagttgcaaagtaggaattcattttcatttgttttaatgggtggagaaaattggaataaagtaggtgttactacctgcttctgtagagttaatgattctgatggagggagataagaaggtgttctttccaactgattttccttgaagtcctcttcctatgtacttcccattgttctagagtaaaggggccgaaactatatgggcaggttgcctagaccttctgacatctggggtagaaaacatggagaacagcgtcatctgtttttttataatattcgttgcctagaaagaggaccttcaaaatcagtggtaccaaacttttttttcagctaagagcagctttaggaattcagagtttgtccaaaggcccaatccctaaaattatactctcaattcttgaagaatgtaaatgccaaatgacaatgaaggtaggccttcattatacaactttatatatattattcacagttttaaaatttttagtcttttgtatcccttctcttttaagttgtccgagattccccctgctcacagattccccctcttgtccttttacctcccttgtacccaatcttccttgcttacagaaaggaagtggaagccccctacctttcaagacgaagtggcactacaccaggatgtgaaagtccagcgaaagagacccaaggggcctagggggcagcacacccccagaagccaagtctattccaggcagtaccagggattagggtctgggctggaaaaatcctggtgttttgaatatgttcaggtccagttcagactcttgatcccacagccacttcttgagtgaggtgggtgttgctctaattcccctgtttctcttgccattttcacagtccctggggattcttcccccttcagcaaagcaaagcaactgtaccagatttctgggttgaatgacatccctgattaataagtggttttcttccttaaaacagaatattattaaagagcatgtatatttcttcataaagccacctaatataacttacctgtttactgagttccttaaagaggaagacttaaagctaccctgagaaatagtatataatattctggggtagtctaaaatgaaaagcagtgtttgggcttattcccatataaaaaggagaaaggagggttgggggtggggaagggttgattttgtttcttctagagcttttttcttcttttgtttttgtttgttttgttttgtttgcatgcaaaaggtatttagttatgtcagtaactgagacttacttaaccattttacaactctttccccaaataaagtacttaaaactctccctgcattagtaggtagccagtttgtattgtgtttataggtttttataaagtcagctactaacctggtactatgtagattgtctaactgtatagatagatagcattaacatttgtgagaaatttcaacaaagaggttaaaccaatacgtttggaattgctggataaaagacccagagcagttaatcttacaattggtgttttccccaaagtatagacatgactgcccgtaaatactgctggggagtctaggactaattccagaaataaaaatacttctggtctacaaatgtgactgcgctgtctctgttaacaccaacatatcctaggatttcctgaaacattttcattcatgatctccagacagatttgtgatactgtggtcataactagctacatagttatgcatttctgcaaagggaaagaatgtcagtaactagctacataccattctgttaaattattaatgatatttattaatgtttcatcatgcctatttcgctgttctgggcactttaagattaaacctggtattaagtgcagcatactcaactagatgtagacttcacttcatagaattttaaatctgatggcaactatatgcaatacgcatttatttttgtgtgtgtttgtaggaaaatttgtagatgtaacaagcaaaacaaagatttttctgaatttccaactctaccataacagaatttcaggcattttccaagaaatggcatgatagcagctgggttgcatgttgtacttagaacactgttgatggagtatatctgttgtgagcctggtttctgtgtatgtgtccaattcagtgataggagaagaaagcctgtaattacatttgcataaagtggttggctgctaaagagatgtaattccattattccaaacttttaattcatattttaaaatataaaaactagtatatatatcaaggaatattttaggaaatcttgtagttacctgtaagtgtctaactgtgtattcaatcagtaaccaatatggaaattgcagagtttcttcatcagaagatatgagtttaaattttatatttggcatgcacagcaatatattaaatgctgtgcttaactagaaagtattgtgcagtgtgatggccttttaacctccacaatatacattttatttttattccctagacttgcacatgaagtgcatatgttcatatttacccgtttggagatgggtaagatacaaccagcatagctccatctccatggccatctttgatttcatgcaactttcctttttcctgtccccctcccaccaaaaaaaaatccattcctaataaacagctatcatgtttcactccatgtgttcagtggtacaaaacctatataaaatatgtacagctctttggaatacttgtttatctagtaatgtacctagtaaattaacaatgttgtataaatttattactttcttttaactgtccatcatagaaactaaattataccttcattttattaatgcttgtctgcctttggtttcatttaggaaaccccacctgtttcctaatactcagagatgattgcctctcagtgagccatgttcagatcatctttttctcaagaatactgacctgcattcttgatgtacccctcccccgttcccatcttgcagacacttttaagtaataaaatgcatgcacctcactaacagagaatactttcctctgtctaaagttcttcacttagaaatttcctttgctgttattaataagatcctttctcacagttttggagcatataactgggtgagttggatacatatctcagaattttctttgatccctcacttctcaattgacattgcaccacattgaactgcacacttattcctgctgtactatatattgtatatctttaagcaggaaaaaatgacttgttatttcaagcgaacaatatgcattatttgactccctgaaagacccattaatctctaagttagagttataccaatcatcggagtttctaatttgtgaatctgtgttctaattaatataaattacaaattactattctattctgcaaagccatacaaactttatatttttgaattacccttcagtattccctaaaacctaaccaggtaacaatcagagttgaagttctttcttcccataaacctgatttttatcctttgccatcaaagcctttttattgtaaaggcttatattaattttctaagtttgaatacatgtataattctacaataatacattgcgcttgaatagtttattttctactcacaaagggtacaaaaagatactaaaccaagcttctcactaagcctggttaataaaggtctcaaataattttctttaaaggactgaatgtcattctcatttctgtagtggaaagagcatagactttggagtcagacagactttgtttcaaatcttagctgtgtcagtgtgtaaccttggggaagtcatgtaatctcaccaccacatcttcccactctgtaaaaatggagtatataccatgtttagtggttgctgaaattaaatgaattaatatgtatttaaagcacctaacaaatattgggcagttcacaatggtagccattactgttgttattatttgtcagtagactaacataactttacagtttagtttttattttgaagttctatggtattatcatgcagctgataaataattttgtccttaatatgcttgcatgtcattggtggatgagaaattattactctaatatttgaaaggtgttgggggttcatcaagatgagaggtatgataaatataagatgccattgtttttacctgtactttcttcagggtatcctgtcttggtagtgaatggaagagggcctggtccctggggcagtgcagaaggcactttgatcatctcactcactgcaaatgtcatgtgaggtttcatggaagtattaagagatccaattaagaagaatagttctgagtctaaaccagcccagagtggcttctctaggggaaactccccgctcagctggtacgtttgtgtttgtcattagggacaccttgtatctcaggtgcctgccttcagacatctgcctgtactggcttcatgttacacacaaatccacatttaataacactcctactgttatttataggcttagttatgttaataagattgtttcaccgagttctttctcttatcctagtggctagtggttgtggaaagaggaggggttagaatgggaaatgaagtgttagtttaagggaagattaggtgttatgctatcatgcattgcttttcgcctttgtgcagccctgaatctgtggaggctagtccagcagttaatgagaagagcgtgtattccactcataattatgggaccactcagaggcatgggtgtcgaggactgccttatgctgtgagtatgcatttgtttctctccagaacagtgatcttcctggagtgtaatccattcttatacattgtgactttcttgaaatgtttatatgcagcatgacgaagttgccccttttgcacttccctgactccagcggacgtctagccctgcatcattgttcttgtttttatgtcccagttgaccttggcattttgttttatcactttcctggttgaagccaaaaaacaaagggtactactttcttctttctttccatatgtaccatactttaggggagagaggggccagtgtttggacactgttgatttaaaaaatcttattttcaggatcataattacggagcccctcctcctccgacacctcctgcttctccccctgtccagacgatcatccctcgttctgacctgaatggcctgccgtcgcctgtagaggaacgctgtggagacagcccgaactctgaaggagaaactgtacctacctggtgtccttgtggtctttctcaggatggcttccttctcaactgtgacaagtgcaggtaagatcctgttccatctaaatttaagtctgggttgctgggattagggtttcttacaagtagggaaaagctcaaagtattctttcttgtgtttgttaatgtagatgattccttagtgctccttggctcgaattctctgcactaggtgagaattgctgacaacaaggaatgagagattgatgttaaagctattgaatttgatatgaaatttaatgtcctggaaacatttggtaggtgggagggagggggtagcatatgcagagacacttcgcccatgtgtgctatgatgtgatgcatgctgttggaaggactactttaagtttattttccctctttaggggaatgagcagggggaaggttattagacttcatcggcggaagcaggacaacatatcaggtgagcggaagatgggttaggtccacaatttgacataaaaatattctgtgatctgaatgttcattttaagaacccctcttggccaggcgcagtggcttacgcctgtaatctcaccacttagggaggccaaagcgggcggatcacctgaggtcgggagtttgagaccagcctgaccaacatggagaaaccccatctctactgaaaatccaaaatagccaggtgtggtggcgcatgcctgtaatcccagctacttgggaggctgaggcaggagaatcgcttgaacccgggaggcggaagttgccatgagctgagattgcgccagtgcactccagcctgggcaacaagagcaaaactccctctcaaaaaaaaaaaaaaaaaaaaaagaacccctcttacaagttcccatggtcccccagccagctcttttcacagaaagagatagaagtcctctcaagaccactgtatagttctctcattgtaaacgaaatgtgttgagaacagtttagtcctgtagcaaagtattccttgtgaacacaaaaaatatggattcctgttttaaaaattagccagtctcaaattgttatagattgagtcagcgaagcttagggactgaatacaaggggagaaataaataccatgaggaacagggtttatatgcttaatgccaatgacatagaatcttgttttcttaaggaagatgagtatttaacgttgctttacagatgataagagttaatagtggaagtaatggcttactgcatgtggggcacacctaaaagaataagctacttttaatgtacttttgaggctattagtacctgaactatgaaatcatcatttttcaggtggggatagcagtgcaacagaaagctgggatgaggagctttctccttccactgtgttgtatacagcaacacagcacacacctacaagcatcaccttaactgttagaagaaccaaacccaagaagcggaaaaagagtccagaaaagggtcgtgcagcaccaaagacgaagaaaatcaaggtatgcagggtaaaaatatcttaaatagaaattgtctgaaatagcttaaattttggagcaagaatgcaccaaaattcttttaagaagtttgatccaggtgtttgaagggccacttttgttctacttgcaaaaatcagctaatctgtgttatgtacatgtagaccaacctctcttctgccacaccatatcatcaccactggctcaaagtttcttctactccagtccccatcccaggtatgaaattccagccctacctggcacaatcccgtatgtgttgcagcctcaagtctaggcttccactatccttacagtatctccccacctctcaaccccaaagtacagtctgaaattcttgtcctggttacatgcctcatgtctttgggttgattgtttttccttgtttcaaaaaaaataaaaatcaggaaacatctcttgtatggtctaggtttcctcagtgtcatggtcactttcctgtattctcagctaaaatgtctacgggagaaacttcttctggtttgtgttctttcttccccatcacagcaactttgttgcttctaggtgacttgttcatcccttgttaaggggattggtctttgtttccttcttagtttcaaaactggtaaatctgcaactttaaagtttttttttatttactttttctcttagtatcagaggtgcatataggatttaagagatgcatgctcttccctgttaattacctagcttcacagtagaaagtattaaaattagtctcagagttcattggccttgagctacccctattcttggtaatagtttggggaattccattgtattttttacctagagaaagggggacagaatagaacactagtttgtgccttagttttagtctcagataggtataactgtcattcttggtaccaagttttgtttgttctacttgttttcctccttgggataggcatttcgagagggatcccggaagtccttgcggatgaaggtaaggggtaatcttcgctgatgctgtgttttacttcactgtgatcttgcattttggtcagcttctttcctgacattgatggtctgggaatcttggactctgcttttcattagtttgtagttgttgccattcagttttcatagagcttttctccaaagtagattttcttggccattttctgaaatattttccctttctgtaatcagccttcattgattggtttttcattcattgctttcctagggggtaagtgacatttttccaaacaaaatgaggctagtgtgttctgtcactgtgattgaactcaaccttaggagtggagtttttctggtaatgatacaggatctcttgtgcatctaccctagcactgtgtgggctttaattgcaggacgcttgtattattgataagaattactgttttctcttagcatatctgtttggtggaaaaaacttaggtaatgctagcatgtttcttaagatatcaaataaaagagtttatgaagtatgattttgtaaagaacttggagaatagagcaagtatgtggaatggtttaaaagaagtgtaaggtgctggttgattaaaaatagcttgccaaaaggagatttgattatgctgtctggtatcctcctttacgtgtgtgtgtgtgtgtgtgtgtgtgtgtataaatatatatatatgaggaaaacatgcctctcaaattattactgggggcttcaaagcatttaaatagaattaaattcaagtttatgagtattcatattcctaaatgatacaaaagcaggatctttcctattgagagttatagggcataaatattaaaatctttagtaaggccaggcgcagtagctcacgcctgtaatcctagcactttggaagaccaaggcaagtggatcacctgaggtcaggaattcaagaccagcctggccaacatggtgaaaccccatctctactaaaaataccaaaattagccaggcgtggtggcaggcacctgtagtcccagctgcttgggaggctgaggcaggagaatcgcttgaacccaggaggcagtggttgtagtgagccgagatcacgccactgcactccagcctgggcaacagagcaagactccatctcaaaaaaaaaaaaaaattcagtaaggataagctttttaggattgctttatgtgcagcaccagtgtgactggtgttagcaaagattacaggtagcactttacctaaagtttgaaggccccacttagtatctatctttaaacagacttgcacatacctgtgaaagagttgggagaggactcagagctacagagcatcagaggcctgggatgtgtcttggaagacaaatcaatcatgcctttgctggatccgtctcttgcaagtggccaagtttgctttagcttcccctttatttttgtctcatttgcttagagaggggccttttaaatagactttggaggcagataatagccctaatcctggctactaaatgcttttctcttatcaagcaactatcataacttatctccagaagctcgaaacctttcaaaagctataaactggctctaccagaaaactgcacataaaccccatattttgcttacagttttgggaggttgacagcctcacaggtgtgttaaaatttagaaaaaaaaattactagtcattttgattcttttaattctaaattgagttataaattttatgctcagaattactagtttaaaactcctccagtgatccaggtgggagccataagaattagaaaaaattatcatttggatttttaatcccagtgtcaagagcagcttccctactgaagacttaattgtaaatcagggtttctcagtcttgacactgttgacagtttggaccagataattctttgttgtggaagggactgttctgtgctttcaagatgtgaacaggatccctggtgtctacccactagatgccggtaacactcatacactcagttgagattatcaaaaatgtcttcagatattaccaaatgtcacctgggtgcaaaatttccctcaattgagaaccactactctaaacccaactgaggtagagtctctaatgccttgaaggatgggacagcagagtaaacacacagtgagattagcgaacaatggctaatactgtgacagaggcttccagaatacagtacacttatcaagtgtaagtttaacaattgccacttaaagctgggaatattgtttggacactgccagtccccctagtctgtaagctccattaagcctaaggttttgcactattcttttgcgcaactgctactgatgtcaagcaggcgatactctgattgtcagtatgttggctttaggtgtttctttagatccctttgtttattgttcagtcttttggactctagtaagaaatgtggagacaatagtgttgattttttttcttctatactcctgttccttgcagaaaggatagtagacaataatcagtcagcaacagtgatgcaaaagtggtaaaagaaagtgttatgataagcatcagtgttttctgtgccattcatagaaagtatatttaattttattgtacctgtttgcaagtttaatgtggacatggattttcaagtagctttggtactacagtgtcttttccttctaatcatcactagcatgacatcatcactgtcagtgtttgttttgttttctgatggcacttaagtcttgaacaccgtggaggagaacatgtattgggcttatgctttgtctctgtagctcaggcactgtctgcctaggaagctgttcctgagttgtagtaatcttttctcaatactgtcaccatagagggcaatggttttcctagaggagtatagcaaagtacctcctagacattttctatattctccctacctactcctctcccctcacttcacctcttcagattatttagaatgtggtaatttaaattgttgaaaatagagtgttagaaagatatactcaaataataactttttatatgggtagtaagattgggattggattaatgagattgattgattaagatcacatctaggtttagaatgaacatgtattatgaaaataataagtgatacaaaaacatgcattctcctggagaatagtcaaaaaaccagtttgggctaacacttaacacagatattcagtgagtatgaaaaatttaagcagtgataaatttgaggtctctactgttcatttgtatgaagattttcttatgaacttgatgtcagtcctttgattagaaaattgatttttatgactttaaaatggtcataaaatcacagtgatgggatgaaactatgatccagattaatttcttactttataaatggagaaactgagcttccccatttaaagaagttattcaaggtctcacctctcattggtaacaaaagcatgatagaaaccagatcctctgactcccagtccattactcttttatgccacatcaattgccaagtgataaattttctctggaaccccagcttgtcccacccccattcccaaccctctatttatgcatggactttactaacctccctgaatttgttttctacagaattctccctctgaagcacagaatttagatgagaatacaactgagggctgggaaaatcggataagactatggactgaccagtatgaagaagctttcactaatcagtacagtgcagatgtacagaacgcgcttgaacaacacctacattctagcaaggaatttgtgggcaaacctactattttagacactattaataagactgaattggcctgtaataacacagttattggttcccaaatgcaggtaagcaccaaagggttgaggactctctaagtagctgaaattttaagaacccaggaagagggtaatggattggaattactgttccttccaaatgtacaaggccatggaataacagattagccaggtgttgatcatatgtaaccaaaagtaggttatattaactggaaactacctggatacatatttttaaactacctttattaataaaaaaatagatgaattgaggctgtgtgcagtgcagtggctcactcctataatacaacactttggcaagaagccaaggtggaaggattgcttgaggccagcagttcaagaccagcctgtacaacatagtgagaccctctctttacaaaaaaaaaaaattaaaagccgttgtgatgatacacacctgtaagtcccagctactggggaggctgaggtggaaggatcacttgaatgaatttgaggttatagtaagctatgattgcaccactgcactccagcctgaatgaaagagtgagaccctggctctatttaaaaaacagagagagagatgacttagtatgggaaattctatataccctaggtaggaattatgtaatatttatagaaagttaagcatgttctttctcatctttattttagagatagagtcactgaagtcttaatcatgtattttttttttttttttaatattttcttgccgtttctggggaggcaatttcactagatgtagcatgtctcttagaaaaattgagctttcatcacattttaaaatttctcatcattgatctaaataacatgtacagataaaacctgaaaatattagcatgttttccttaattatgaagtaatttgagtgtctactaaggtgttcttgctgttgtttaatgttattgctctggttttattcagttacagctgggaagagtcactcgtgttcaaaagcaccggaagatcctgagggctgcaagagatttggctttggacactcttataatagagtatcgtgggaaagtcatgttacgacagcaatttgaggtcaatgggcatttcttcaaaaagtaagaacgtcattcattgagcagtgagggctaaggtggacctggttgaccagtgttgttgtaaaaatcattctgtttgataagacgctcttgggagaaaaaaatcacaactcagataagctcacacctgtctgctatttgtagagaagtgcaagtaaatcttcaaattgttcaatgtataaaatggtgacacctcctttccaagccaagcattccttgctttgtgcttgttctttaatcaaaagcagacaaacgtgatgctttcccaagtttaggcgttgcaaaagactgctgctgcttctctcagcatatgcttcatatttggagtcatggggtggccttcttatttgtgttgagaattacaggaattttaattgtatccctagaccatacccctttgtgctcttctactcaaaattcaatggtgtagagatgtgtgtggatgcccgtactttcggtaatgatgctcggttcatcagaagatcatgtacaccaaatgcagaggtaagatatctgtagcaacttccctttgactggaaccatcaaatgacaagcttactgaagaagcagtgtgaaaacttcactcagataaaggtctgtagataatagtcgtgatatttcatcgtgggaggtgaaaaacaaaagtaatggtgcttttatacgacaaaatgggcgcaaggaaagagttttctttagagaaggcagaaatagaaaagagcaagttagcatttgctaaggagaaaaagctagactggataagaaaatcaagtgtagttatattaaagagattgccatacggtggaagtagatgttgttaggcctaactaagctatttggttgcagtttttttagattttagtgagtaatgttttatgagaggatctagacatttctagaattcattactcagagcaaccacatcaaataaagcaagaaaatccacagagctttacttactggctaaggaattttaattctctggtggagctggaaacagctataagatgtgaaagcggctgggcgcagtggctcatgcctgtaatcccagcacttcggaaggctgaggtgggcagataacaaggtcaggagttcgagaccagcctggccaacatggtgaaaccccgtctctactaaaaaaaaatagaaaacttagccaggcattgtggcgtgtgcctgtattcccaggtactcaggaggctgagacaggagaattgcttgaacccgggaggcagaggttgccgtgagccgagatcacgccactccactccagcctgagcgacagagcaagactgtatctcaaaaaaaagatgtgaaagtagagattttaccctgatttctaacatctcaaggtttctccacatatttaagaaagtattataaattttcaagccagtgcagtataatagtttcagatgaaatgaaggggttaaataacagattaccataactccttaaataaataatagattaccataactccaaatggagagaaagtatggtttttttctctcttacggaaagttcatggtctttatgaaaaatccaaccagaagccttttcacacaggtgcgacacatgattgcagatgggatgattcacctgtgcatctatgctgtgtctgccatcaccaaggatgctgaggtcaccatagcatttgattatgagtatagtaactggtaagacctcagaaacctttcctaacaggaatatccatgtcttacatattaagctattcactctatttaaagtctgctcttgtttcttgccttttcctttgtttacttaatcttttcatgactaatgaattttctgcctagaaattgtaaaggaaaagacaggcaagattttttttagagatacggataccttgtatgatactgctcacaaatttcctgacagaagtgttttcgcttatgcctttttagcaagaatagcaaaatggatatatatgtatgtatgagacactcctggaaattacaatagcatcctgttgttatgcacagagtacttatgtcagggaccatatagaatgagaatttaggccaggcgcagtggctcacaggcctgtaatctcaacactttggaaggctgaggcgggcggatcacgaggtcaggagatcgagaccatcctggccaatgatgaaaccctgtctctactaaaaacacaaaaattagctgggcgtggcggcacacgcctgtagtcccagccacttgagaggctgaggcaggagaatcactcgaacctgagaggctgaggctgcagtaagccaagatcacgccactgcactccagcctggcaacagagggagactctgtcttaaaaaaaaagagagagaatttaatatgttacctctacttttaatttgtcaattatacccttataaagctaggggtgagatttaaagatccaccctgtccacagaaaccatgttatctagctgtatatgacagtgcagaaaaccataaagggcaattcatagatgaatatgtgggattttttaaagtatatgctttttgttctttggtcatttggggcaaaatagaggttatgtggtaaagtgatgtttggcccaggtataaggaaaaaagatgttctgcttaattcatcaaggaaaataaaaaaggttttaagaaggttataaaaggttttaagaagtagggaattagtaggtaaaagtgaggacatggtaatcgtgggcacaagatgagtatggccacatcagactttatcattgataaactgcctgctaaatagccaataaaccactggggggattgaatttagggagggctttcttttttttttcccactgaccatggagtagaattggggttacacaaagaaagacagaatattgaaagtgttacgtcaggcgcggtgactgacgcctgtaatcccagcactttgggaggctaaggctggaggatcacttgagcccaggagttcaagaccagcctagacaacatggcaaaaccccgtctctgccgaaaataaaaaaattagctgggcgtgtagtcccagctactcaggaggctgaggtaggaggatcacttgagcccaggaaacagagattaccgagagctgtgatgcaccactgcactccagcctagatgacagagcgagattccgtctccaataaaaagaaaaacaaaagtatttataggactctctaatgtctctgtttaacttattcagagacaatatcagaggaagttactgtactgatattttaagagggtgaatggataatgtaactgaatttcaagggtactgagacaggcattttggttgtttctttggagcagtaattataaagtggactgtgcctgtcacaagggaaaccggaattgtcctatacaaaaaaggaatcctaatgctacagaactgccactcctaccacctcctccaagcctacccaccattggagcagagactagacgtagaaaagcacgacggaaagagctagagatggagcagcagaatgaggcttcagaggagaataatgaccagcaatcacaagaagttccagaaaaagtaactgtatccagtgatcatgaggtaatcgcccctggtcaaatgatgatgctatggcatcaatcctccaaaggaagaggaacccgggttgccgcatggtttaagtaggggagctatagtaacacttagtgccctttatatcaatgtgggtttattgtgttcatacatttctttctgttttacaaagtcaaaaacatcctttgctggttttgcaccagagaataggggttagttatcatctgtgtttaccatgtggcctcacatgagttaacagtttaaagcactagagattgttatagagagttttaagctaccagaataaaacagattgattttttctcagagcttgagtacagctgaatattgcctctatcttaaaggaagtagacaatccagaagaaaaaccagaagaagagaaagaagaggttatagatgaccaggagaacctagctcatagcaggagggtgagtactgtctgacattactttgctccttctcattcctgctacctccatcatgtgaacctcttctgttctcttgactttgtatcatctcattgatttgacctgaaggttataatttgggctttttccgtaataaagattttattataatttttttatttatttttctctatacacacagtagttttgtagtgattattatctagtgatggtttgaagaggttgtttttttttttttttttttttttactaacaatctggtttccgctgggcgcggtggctcacgcctgtaatcccagcactttgggagggcgaggtgggcggatcacgaggtcaggagatcgagaccatcctcgctaacacggtgaaaccttgtctctactaaaaatacaaaaaattagccgggcgcggtggcgggtgcctgtagtcccagctactcgggaggctaaggcaggagaatggcatgaacctgggaggcagagcttgcagtgagtggagatagcgccactgcactccggcctgggcaaaagagcgagactccatctcaaaaaaaaaaaaaaaaaaaaaatctggtttccgaaaaactggctggtcagaatcaaaatgtattatagttggtttgctctgaattaggaattttctaggtttttgtgagttctgaagtttttttaaacccttttagtcatatgaactaaaattttctacttttatgctgaaaccaatcctgtgtgtttatgaccctgatttgatgacttttttttttttctttttgagaccgactcttgctctgtcaccaggctggagtgcagtggcgcaatctcaactcaccacaatctctgcctcccgggttcaagcaattccccttccttagcctcccaagtagctggcattacaagcatgcgccaccatgcctgggtaattttttgtattttagtagagacggagtttcaccatgttggccacgacggtctcaatctcccgacctcatgatcttcccacctcagcctcccaaagtactgggattacaggcgtgagccactgcacccatcctgtttttctttcatattaaagtttcaaaataactgaccctttttgaaaagtttatgtttgaccttgcctttatttacaactattccccacatttaaaatgaaatattttatttttaatcttctgttttccaagttatatgtgtcatcttactggtagttaaatgaatttctgtaaatttccattaaaaatacttttataaaagctatccactcgtcctcatttgaagcttccttctacaccagtactatctctttctagaccagggaagatagaaaggtagaagccatcatgcatgcttttgaaaacttagagaaaagaaagaagcggcgggatcagcccttggaacagagcaactctgatgtagagattactacaaccacctcagagactcctgttggtgaagagacaaaaactgaagcccctgaatctgaagttagcaactctgtttcaaatgttaccatcccaagcaccccacagagtgttggtgtgaatacccggaggtcttcccaagcaggggtaagagttgaaaagacttcagcacttagacatcctcacctttgctaatgtcaatacctaacttttggaatttttaaaatcagtgttttcagctttgctccatatcacaataaataaggccattaactgtttaactggaaccatttcattggcctattttataaatgcttattagaaataacgcaaacatttgtcgctagcctctttagctcatttaagtgtatacatttttgtatttaaaaattagattttaaattagtgtttctaatccttatatttttcatcagtagacattctgaatgcttaaagtgaataggaaattagactgtttgctgataaaacatttctggtaagcatctgaccctactattgctacaggatattgctgcagaaaaactagtccccaagccacctccagcaaagccttctaggccccggccgaagagtcgaatttctcggtacaggaccagttcagcccaaagactaaagcgtcagaagcaggccaatgcacagcaggcagaattgtcacaagctgccttggaagagggaggaagtaacagtttagtaactcctactgaagctggaagtctagacagttcaggagaaaacaggccattaacagggtctgacccaactgtggtgtcaattactggatcccatgtcaaccgtgctgcatctaaataccccaaaaccaaaaaggtaagtcacaaatgcatcctttataagtccagtctggcaagggctgtcttagtgaaatgagaggacctataatccctagaagaaactaatctcaatattactagattgaaagttctaaaatgctttgacacaaaaggctggagtcatcctgctacctgtttccttatttttagtcagcttaaatcactgatagctgaaattattcctctcttagtgggcgtggagagggtgaaggaagatatccttgtgttctagttgctcaattcattcttactgcagctgctgcatctcctcctgtcctagtttctagatgacgtttgtctttatgaactacactgctacctcttgatttataaactaatgatctcttttttaccttagtatctagttacagaatggttgaatgacaaagcagagaagcaagagtgccctgttgagtgccctttacgtatcaca

SEQ ID NO: 372 - DNA, 4035 bp, Homo sapiens
  source 1..4035: mol_type = genomic DNA
atgagcagggggaaggttattagacttcatcggcggaagcaggacaacatatcaggtggggatagcagtgcaacagaaagctgggatgaggagctttctccttccactgtgttgtatacagcaacacagcacacacctacaagcatcaccttaactgttagaagaaccaaacccaagaagcggaaaaagagtccagaaaagggtcgtgcagcaccaaagacgaagaaaatcaaggcatttcgagagggatcccggaagtccttgcggatgaagaattctccctctgaagcacagaatttagatgagaatacaactgagggctgggaaaatcggataagactatggactgaccagtatgaagaagctttcactaatcagtacagtgcagatgtacagaacgcgcttgaacaacacctacattctagcaaggaatttgtgggcaaacctactattttagacactattaataagactgaattggcctgtaataacacagttattggttcccaaatgcagttacagctgggaagagtcactcgtgttcaaaagcaccggaagatcctgagggctgcaagagatttggctttggacactcttataatagagtatcgtgggaaagtcatgttacgacagcaatttgaggtcaatgggcatttcttcaaaaaaccatacccctttgtgctcttctactcaaaattcaatggtgtagagatgtgtgtggatgcccgtactttcggtaatgatgctcggttcatcagaagatcatgtacaccaaatgcagaggtgcgacacatgattgcagatgggatgattcacctgtgcatctatgctgtgtctgccatcaccaaggatgctgaggtcaccatagcatttgattatgagtatagtaactgtaattataaagtggactgtgcctgtcacaagggaaaccggaattgtcctatacaaaaaaggaatcctaatgctacagaactgccactcctaccacctcctccaagcctacccaccattggagcagagactagacgtagaaaagcacgacggaaagagctagagatggagcagcagaatgaggcttcagaggagaataatgaccagcaatcacaagaagttccagaaaaagtaactgtatccagtgatcatgaggaagtagacaatccagaagaaaaaccagaagaagagaaagaagaggttatagatgaccaggagaacctagctcatagcaggaggaccagggaagatagaaaggtagaagccatcatgcatgcttttgaaaacttagagaaaagaaagaagcggcgggatcagcccttggaacagagcaactctgatgtagagattactacaaccacctcagagactcctgttggtgaagagacaaaaactgaagcccctgaatctgaagttagcaactctgtttcaaatgttaccatcccaagcaccccacagagtgttggtgtgaatacccggaggtcttcccaagcaggggatattgctgcagaaaaactagtccccaagccacctccagcaaagccttctaggccccggccgaagagtcgaatttctcggtacaggaccagttcagcccaaagactaaagcgtcagaagcaggccaatgcacagcaggcagaattgtcacaagctgccttggaagagggaggaagtaacagtttagtaactcctactgaagctggaagtctagacagttcaggagaaaacaggccattaacagggtctgacccaactgtggtgtcaattactggatcccatgtcaaccgtgctgcatctaaataccccaaaaccaaaaagtatctagttacagaatggttgaatgacaaagcagagaagcaagagtgccctgttgagtgccctttacgtatcacaacggatccaactgtactggcaacgaccctaaacatgttaccaggtcttatccattccccgttaatttgcaccacccccaaacactacattcgctttggctcaccctttatccctgagagacgtcgaaggccccttctgcctgatggcacattcagctcctgtaagaagcgctggataaaacaagccttagaagaagggatgactcaaacatcatctgtaccccaagagactagaactcagcacctataccaaagcaatgagaatagtagctcttctagtatctgcaaagacaatgcagacttgttgagcccattaaagaaatggaagtctcgctatctgatggagcagaatgtcaccaagttacttcggcctctgtctccagtcacaccaccccctcccaattcaggctcaaagagtccccagctggccacacctggctcatctcacccaggagaagaggagtgtcgaaatggatacagcctcatgttttcaccagtcacatctcttactactgctagtcgctgcaacactcctctacagtttgagctttgtcaccgaaaagacctggatttggcaaaagtaggataccttgactccaacactaacagctgtgctgatagaccttccctactcaactcaggtcattctgacctggctcctcatccctccctcggacccacttctgagactggtttcccaagcagaagtggagatggacatcagaccctcgtgagaaactcagaccaggcatttcggacagagttcaacttgatgtatgcctactcccctttgaatgctatgcctcgagcagatggactgtatcgaggatctcctctagtgggggataggaagcctttacatttggatgggggatattgttcccctgcagaaggattttccagcagatatgaacatggcttaatgaaagacctctctcgtggatccttgtcacctggtggtgaaagggcctgtgaaggagtcccatctgccccccagaacccaccacagaggaaaaaagtatccctgctggagtaccgaaaacggaaacaagaagctaaggaaaattctgctggtgggggaggtgactctgcacagagcaaaagcaagtctgcaggagctgggcaaggcagcagtaactccgtttccgacactggtgcccatggtgtgcagggatcctcagcccgaactccatcttcccctcacaaaaaattctccccatctcattcctctatgtcccatttggaggcggtaagcccatcagattccagaggcacttcttcatctcactgcagacctcaagagaatatcagcagtaggtggatggttcccacatcagtagaacgactccgagaaggagggagcatccccaaggtcctccgaagcagcgtgagggtggcccaaaagggagagccctctcccacatgggagagtaacatcacagagaaagactcagaccctgcagatggagaaggcccagagacattaagctcagcactctctaaaggagcaacagtttacagcccttccagatacagctaccagctcctgcagtgtgatagtcctcggacagaatcacaaagcctccttcagcagagttcctcccccttcagaggacatcctacacagtctccaggatacagttatcgaactactgcactgagacctggaaaccccccctctcacggttcttcagaatcatccctctcttccacgtcctattccagccccgcccaccctgtgtccacagactcgttggccccatttacggggacaccagggtattttagcagccagccacattctggaaacagcactggcagcaatcttccaaggaggagctgcccttctagtgctgctagccctaccctgcagggaccctcagactcgccaacctcagattcagtttctcagtccagcacaggaactctgagttccacctcctttcctcagaactctaggtcgtcattgccatcagacttacggactatcagtctgcccagtgctgggcagtcagctgtctaccaggcctccagggtatctgcggtttccaattcacagcactacccacaccgtgggagtgggggtgtgcaccagtaccgactccagccactgcaagggtcaggagtcaagactcagacgggactttcctag

SEQ ID NO: 373 - DNA, 3362 bp, Homo sapiens
  source 1..3362: mol_type = genomic DNA
tgtagagatgtgtgtggatgcccgtactttcggtaatgatgctcggttcatcagaagatcatgtacaccaaatgcagaggtgcgacacatgattgcagatgggatgattcacctgtgcatctatgctgtgtctgccatcaccaaggatgctgaggtcaccatagcatttgattatgagtatagtaactgtaattataaagtggactgtgcctgtcacaagggaaaccggaattgtcctatacaaaaaaggaatcctaatgctacagaactgccactcctaccacctcctccaagcctacccaccattggagcagagactagacgtagaaaagcacgacggaaagagctagagatggagcagcagaatgaggcttcagaggagaataatgaccagcaatcacaagaagttccagaaaaagtaactgtatccagtgatcatgaggaagtagacaatccagaagaaaaaccagaagaagagaaagaagaggttatagatgaccaggagaacctagctcatagcaggaggaccagggaagatagaaaggtagaagccatcatgcatgcttttgaaaacttagagaaaagaaagaagcggcgggatcagcccttggaacagagcaactctgatgtagagattactacaaccacctcagagactcctgttggtgaagagacaaaaactgaagcccctgaatctgaagttagcaactctgtttcaaatgttaccatcccaagcaccccacagagtgttggtgtgaatacccggaggtcttcccaagcaggggatattgctgcagaaaaactagtccccaagccacctccagcaaagccttctaggccccggccgaagagtcgaatttctcggtacaggaccagttcagcccaaagactaaagcgtcagaagcaggccaatgcacagcaggcagaattgtcacaagctgccttggaagagggaggaagtaacagtttagtaactcctactgaagctggaagtctagacagttcaggagaaaacaggccattaacagggtctgacccaactgtggtgtcaattactggatcccatgtcaaccgtgctgcatctaaataccccaaaaccaaaaagtatctagttacagaatggttgaatgacaaagcagagaagcaagagtgccctgttgagtgccctttacgtatcacaacggatccaactgtactggcaacgaccctaaacatgttaccaggtcttatccattccccgttaatttgcaccacccccaaacactacattcgctttggctcaccctttatccctgagagacgtcgaaggccccttctgcctgatggcacattcagctcctgtaagaagcgctggataaaacaagccttagaagaagggatgactcaaacatcatctgtaccccaagagactagaactcagcacctataccaaagcaatgagaatagtagctcttctagtatctgcaaagacaatgcagacttgttgagcccattaaagaaatggaagtctcgctatctgatggagcagaatgtcaccaagttacttcggcctctgtctccagtcacaccaccccctcccaattcaggctcaaagagtccccagctggccacacctggctcatctcacccaggagaagaggagtgtcgaaatggatacagcctcatgttttcaccagtcacatctcttactactgctagtcgctgcaacactcctctacagtttgagctttgtcaccgaaaagacctggatttggcaaaagtaggataccttgactccaacactaacagctgtgctgatagaccttccctactcaactcaggtcattctgacctggctcctcatccctccctcggacccacttctgagactggtttcccaagcagaagtggagatggacatcagaccctcgtgagaaactcagaccaggcatttcggacagagttcaacttgatgtatgcctactcccctttgaatgctatgcctcgagcagatggactgtatcgaggatctcctctagtgggggataggaagcctttacatttggatgggggatattgttcccctgcagaaggattttccagcagatatgaacatggcttaatgaaagacctctctcgtggatccttgtcacctggtggtgaaagggcctgtgaaggagtcccatctgccccccagaacccaccacagaggaaaaaagtatccctgctggagtaccgaaaacggaaacaagaagctaaggaaaattctgctggtgggggaggtgactctgcacagagcaaaagcaagtctgcaggagctgggcaaggcagcagtaactccgtttccgacactggtgcccatggtgtgcagggatcctcagcccgaactccatcttcccctcacaaaaaattctccccatctcattcctctatgtcccatttggaggcggtaagcccatcagattccagaggcacttcttcatctcactgcagacctcaagagaatatcagcagtaggtggatggttcccacatcagtagaacgactccgagaaggagggagcatccccaaggtcctccgaagcagcgtgagggtggcccaaaagggagagccctctcccacatgggagagtaacatcacagagaaagactcagaccctgcagatggagaaggcccagagacattaagctcagcactctctaaaggagcaacagtttacagcccttccagatacagctaccagatatgtgactaagacagttgaaggagccactctagattggttggtcaagaaaagtctctgaggagttgacatttaaactgagacttcagtgacaaggaggcagtcctgggacgatgtgagtgaaattcattcttgaacgttgcagactctgtggtagaaaaagcttggttaagatgtaataaatggatggggctgggaaagaggatagaagatcctgtaagagggagataggggacagatcatgtagagcaggagtcggcaaactctttctataaagggccagatagtaaatatttagactttgcaagccatgtatggtctctgtcataactattcagccctttggctgggtgcgaatcatgcctgtaattccagcactttgggaggcccaagagagcagatcacttgaggtcagaagttcgagaccagcctggccaacatggcaaaaccctgtctactaaaaatacaaaaattaaccaggtgtggtggtgcgcacctgtaatcccagctactcaggaggctgaggcaggagaatctcttgaacctgggaggaggaggttatagtgaaccaaggtcactccactgcactccagcctgggtgatggagcgagactctgtctcaaaaaaaaaaaaaaaaaaa

SEQ ID NO: 374 - DNA, 6931 bp, Homo sapiens
  source 1..6931: mol_type = genomic DNA
agtggcgtttccgctcgggcagcgggctgagtgagctgccgccgccgccgccgccgccgccgccgccgccgctgccgggggaggggcggccgccgcccgcctgcgctcagagactcacgcagccccagtcccgccagtccgccaacacagtagtgccggcccccctctttccctggccctgccccccctccccgcctttggctcgctccgcctttctgccccccacccccacctcacgggtacgggccattcccggccaggaaacgccgtggcgccgcgttgggcctaactcgagtcctgccgcctcccgggagtgccgtgcgccgcagcccgggcccaggccccggcagcgcctgggacaaggtcttcagaactactagcagataatttggggggacttcatattcagaagtctatataaaggattcctcatgtccataacatgttggatgaggctctgcagctcacccccactctcagagtggtcagtctccattaattggaccccgtgatttccaatctctgctgtgttggacgtcatgagcattgcaatccctctgggagtcaccacatcagatacatcctactcagatatggctgctggatcagaccctgaatctgtggaggctagtccagcagttaatgagaagagcgtgtattccactcataattatgggaccactcagaggcatgggtgtcgaggactgccttatgctacgatcatccctcgttctgacctgaatggcctgccgtcgcctgtagaggaacgctgtggagacagcccgaactctgaaggagaaactgtacctacctggtgtccttgtggtctttctcaggatggcttccttctcaactgtgacaagtgcaggggaatgagcagggggaaggttattagacttcatcggcggaagcaggacaacatatcaggtggggatagcagtgcaacagaaagctgggatgaggagctttctccttccactgtgttgtatacagcaacacagcacacacctacaagcatcaccttaactgttagaagaaccaaacccaagaagcggaaaaagagtccagaaaagggtcgtgcagcaccaaagacgaagaaaatcaagaattctccctctgaagcacagaatttagatgagaatacaactgagggctgggaaaatcggataagactatggactgaccagtatgaagaagctttcactaatcagtacagtgcagatgtacagaacgcgcttgaacaacacctacattctagcaaggaatttgtgggcaaacctactattttagacactattaataagactgaattggcctgtaataacacagttattggttcccaaatgcagttacagctgggaagagtcactcgtgttcaaaagcaccggaagatcctgagggctgcaagagatttggctttggacactcttataatagagtatcgtgggaaagtcatgttacgacagcaatttgaggtcaatgggcatttcttcaaaaaaccatacccctttgtgctcttctactcaaaattcaatggtgtagagatgtgtgtggatgcccgtactttcggtaatgatgctcggttcatcagaagatcatgtacaccaaatgcagaggtgcgacacatgattgcagatgggatgattcacctgtgcatctatgctgtgtctgccatcaccaaggatgctgaggtcaccatagcatttgattatgagtatagtaactgtaattataaagtggactgtgcctgtcacaagggaaaccggaattgtcctatacaaaaaaggaatcctaatgctacagaactgccactcctaccacctcctccaagcctacccaccattggagcagagactagacgtagaaaagcacgacggaaagagctagagatggagcagcagaatgaggcttcagaggagaataatgaccagcaatcacaagaagttccagaaaaagtaactgtatccagtgatcatgaggaagtagacaatccagaagaaaaaccagaagaagagaaagaagaggttatagatgaccaggagaacctagctcatagcaggaggaccagggaagatagaaaggtagaagccatcatgcatgcttttgaaaacttagagaaaagaaagaagcggcgggatcagcccttggaacagagcaactctgatgtagagattactacaaccacctcagagactcctgttggtgaagagacaaaaactgaagcccctgaatctgaagttagcaactctgtttcaaatgttaccatcccaagcaccccacagagtgttggtgtgaatacccggaggtcttcccaagcaggggatattgctgcagaaaaactagtccccaagccacctccagcaaagccttctaggccccggccgaagagtcgaatttctcggtacaggaccagttcagcccaaagactaaagcgtcagaagcaggccaatgcacagcaggcagaattgtcacaagctgccttggaagagggaggaagtaacagtttagtaactcctactgaagctggaagtctagacagttcaggagaaaacaggccattaacagggtctgacccaactgtggtgtcaattactggatcccatgtcaaccgtgctgcatctaaataccccaaaaccaaaaagtatctagttacagaatggttgaatgacaaagcagagaagcaagagtgccctgttgagtgccctttacgtatcacaacggatccaactgtactggcaacgaccctaaacatgttaccaggtcttatccattccccgttaatttgcaccacccccaaacactacattcgctttggctcaccctttatccctgagagacgtcgaaggccccttctgcctgatggcacattcagctcctgtaagaagcgctggataaaacaagccttagaagaagggatgactcaaacatcatctgtaccccaagagactagaactcagcacctataccaaagcaatgagaatagtagctcttctagtatctgcaaagacaatgcagacttgttgagcccattaaagaaatggaagtctcgctatctgatggagcagaatgtcaccaagttacttcggcctctgtctccagtcacaccaccccctcccaattcaggctcaaagagtccccagctggccacacctggctcatctcacccaggagaagaggagtgtcgaaatggatacagcctcatgttttcaccagtcacatctcttactactgctagtcgctgcaacactcctctacagtttgagctttgtcaccgaaaagacctggatttggcaaaagtaggataccttgactccaacactaacagctgtgctgatagaccttccctactcaactcaggtcattctgacctggctcctcatccctccctcggacccacttctgagactggtttcccaagcagaagtggagatggacatcagaccctcgtgagaaactcagaccaggcatttcggacagagttcaacttgatgtatgcctactcccctttgaatgctatgcctcgagcagatggactgtatcgaggatctcctctagtgggggataggaagcctttacatttggatgggggatattgttcccctgcagaaggattttccagcagatatgaacatggcttaatgaaagacctctctcgtggatccttgtcacctggtggtgaaagggcctgtgaaggagtcccatctgccccccagaacccaccacagaggaaaaaagtatccctgctggagtaccgaaaacggaaacaagaagctaaggaaaattctgctggtgggggaggtgactctgcacagagcaaaagcaagtctgcaggagctgggcaaggcagcagtaactccgtttccgacactggtgcccatggtgtgcagggatcctcagcccgaactccatcttcccctcacaaaaaattctccccatctcattcctctatgtcccatttggaggcggtaagcccatcagattccagaggcacttcttcatctcactgcagacctcaagagaatatcagcagtaggtggatggttcccacatcagtagaacgactccgagaaggagggagcatccccaaggtcctccgaagcagcgtgagggtggcccaaaagggagagccctctcccacatgggagagtaacatcacagagaaagactcagaccctgcagatggagaaggcccagagacattaagctcagcactctctaaaggagcaacagtttacagcccttccagatacagctaccagctcctgcagtgtgatagtcctcggacagaatcacaaagcctccttcagcagagttcctcccccttcagaggacatcctacacagtctccaggatacagttatcgaactactgcactgagacctggaaaccccccctctcacggttcttcagaatcatccctctcttccacgtcctattccagccccgcccaccctgtgtccacagactcgttggccccatttacggggacaccagggtattttagcagccagccacattctggaaacagcactggcagcaatcttccaaggaggagctgcccttctagtgctgctagccctaccctgcagggaccctcagactcgccaacctcagattcagtttctcagtccagcacaggaactctgagttccacctcctttcctcagaactctaggtcgtcattgccatcagacttacggactatcagtctgcccagtgctgggcagtcagctgtctaccaggcctccagggtatctgcggtttccaattcacagcactacccacaccgtgggagtgggggtgtgcaccagtaccgactccagccactgcaagggtcaggagtcaagactcagacgggactttcctagggcttctggatttgggcaaacagaactgaatgagcccatagctgcttccttccagctgcctctggaacctaggccgagcatattgctgaggaacggggggtacaaggtgccagaggattgggtctggtggacaagaaacaagacttgtggtcacaattggcctctggccttggagaaagctgtaaatcttgtctgaagcagagactataaagaagtttctccctgctgtcaagggtacattgttgacaagcaaatggtgtttcggttagtaacggttctaagtgcaatgagttgtgttgaagcctccgtctcccatccttgcctgtagcccgtagtcacttgtgcagtgaggacatctttttaaatttaaaaaaaaaaaaaaaaaaagttttcaaaggaaaaaaagttaaaagagccaatctcaaagccccaagccatctgagtactgttagggttttatgcacttaagaaaaaaggtaggtatgtaaatgttcatcctaagacaaccattccaaaagcaggtatctggccaatgtgtgtccaccaagaatactgtttatctttgtcttaagatcaccaagaaataggcaaggatagtaaagcttggaacctgcaccaactggagggtgcctggctctttgaagaaaagctcatggtcagctcttgattattcgggagcagattatttgagtagattgtctgagcctccaactgttaccatcctactcccccttcccaagctatttcacagctcagtaacccatgaagtaagtagacaagaaaaggaggaatgagacatgatataggccaattgcattgctacttaccagcttttggcaataaatttcattaggaaggataccgagtggtttgggaatgcttcgaattttattttttctactcccaattaatcaggagttgatgatcccatgagcaggaccgcctccatgattggggagcatgcacttgtgactgcagggtaagagtgggaagataggtttgtggagtggcaccgacaggactgtgattgtgtgtgggcctgccccacatttctctgggggatgcttatgtgagagtgggcccagtgaaagagttaccaagccacccacacccctaacactgttctggatgagagatgagagcagaccggcttctccccatcagtgcattgtgcctgttgtacacccctggaggagccctggagccagcccaggtggggtacacaatctttttaaattccatatggttgccagcttatttctttcacttgtttactgtaatatctggcgtgtttttatttatctaattttgtattcagttataaccatggtaggggtagtgaatatatgacaggtgtaatccctggtgctgcagtggaccttcttttcttttggacaagataatactgtgagtttccctccttccttccctctaatttgttttccttttttccccagcctcttgcatccccttcttttctaccctgtcctacaactatcatatgcacagtcttctctctttgtgtgtgactgttacaaaatttcacttttcaaaatcgaaatcaggtgtttgctcaaatgaggggagattttttttttttttttttttttaaatgctgagacctcagcagagtacttttctttttgttgtttcccccacaaacccatcagtctgggagagcattgggagtggaaatcatgttgcctgggatgctggtttctttgtatattatataaaacgtatgtaaatgtctctccatttgggctggggtttgcattctccccttggctatttaaccaaggggagaggccagcgggcaggcggccctcaccctgcctggcacgtgcagagaccccagccactctgtgtgggcagggtgctgtcaagaccagacctcttgggggggtaggggcgggggggtggggggaactcttggaagggaagaagtatcacttctttctcaagtggagtgtttacaccttgctgtaacatttgaactttcacaagagatgtaataattttgataataaaattcttaaccataataatcataaagttgagaa

SEQ ID NO: 375 - DNA, 6582 bp, Homo sapiens
  source 1..6582: mol_type = genomic DNA
ctcgagtcctgccgcctcccgggagtgccgtgcgccgcagcccgggcccaggccccggcagcgcctgggacaaggattcctcatgtccataacatgttggatgaggctctgcagctcacccccactctcagagtggtcagtctccattaattggaccccgtgatttccaatctctgctgtgttggacgtcatgagcattgcaatccctctgggagtcaccacatcagatacatcctactcagatatggctgctggatcagaccctgaatctgtggaggctagtccagcagttaatgagaagagcgtgtattccactcataattatgggaccactcagaggcatgggtgtcgaggactgccttatgctacgatcatccctcgttctgacctgaatggcctgccgtcgcctgtagaggaacgctgtggagacagcccgaactctgaaggagaaactgtacctacctggtgtccttgtggtctttctcaggatggcttccttctcaactgtgacaagtgcaggggaatgagcagggggaaggttattagacttcatcggcggaagcaggacaacatatcaggtggggatagcagtgcaacagaaagctgggatgaggagctttctccttccactgtgttgtatacagcaacacagcacacacctacaagcatcaccttaactgttagaagaaccaaacccaagaagcggaaaaagagtccagaaaagggtcgtgcagcaccaaagacgaagaaaatcaagaattctccctctgaagcacagaatttagatgagaatacaactgagggctgggaaaatcggataagactatggactgaccagtatgaagaagctttcactaatcagtacagtgcagatgtacagaacgcgcttgaacaacacctacattctagcaaggaatttgtgggcaaacctactattttagacactattaataagactgaattggcctgtaataacacagttattggttcccaaatgcagttacagctgggaagagtcactcgtgttcaaaagcaccggaagatcctgagggctgcaagagatttggctttggacactcttataatagagtatcgtgggaaagtcatgttacgacagcaatttgaggtcaatgggcatttcttcaaaaaaccatacccctttgtgctcttctactcaaaattcaatggtgtagagatgtgtgtggatgcccgtactttcggtaatgatgctcggttcatcagaagatcatgtacaccaaatgcagaggtgcgacacatgattgcagatgggatgattcacctgtgcatctatgctgtgtctgccatcaccaaggatgctgaggtcaccatagcatttgattatgagtatagtaactgtaattataaagtggactgtgcctgtcacaagggaaaccggaattgtcctatacaaaaaaggaatcctaatgctacagaactgccactcctaccacctcctccaagcctacccaccattggagcagagactagacgtagaaaagcacgacggaaagagctagagatggagcagcagaatgaggcttcagaggagaataatgaccagcaatcacaagaagttccagaaaaagtaactgtatccagtgatcatgaggaagtagacaatccagaagaaaaaccagaagaagagaaagaagaggttatagatgaccaggagaacctagctcatagcaggaggaccagggaagatagaaaggtagaagccatcatgcatgcttttgaaaacttagagaaaagaaagaagcggcgggatcagcccttggaacagagcaactctgatgtagagattactacaaccacctcagagactcctgttggtgaagagacaaaaactgaagcccctgaatctgaagttagcaactctgtttcaaatgttaccatcccaagcaccccacagagtgttggtgtgaatacccggaggtcttcccaagcaggggatattgctgcagaaaaactagtccccaagccacctccagcaaagccttctaggccccggccgaagagtcgaatttctcggtacaggaccagttcagcccaaagactaaagcgtcagaagcaggccaatgcacagcaggcagaattgtcacaagctgccttggaagagggaggaagtaacagtttagtaactcctactgaagctggaagtctagacagttcaggagaaaacaggccattaacagggtctgacccaactgtggtgtcaattactggatcccatgtcaaccgtgctgcatctaaataccccaaaaccaaaaagtatctagttacagaatggttgaatgacaaagcagagaagcaagagtgccctgttgagtgccctttacgtatcacaacggatccaactgtactggcaacgaccctaaacatgttaccaggtcttatccattccccgttaatttgcaccacccccaaacactacattcgctttggctcaccctttatccctgagagacgtcgaaggccccttctgcctgatggcacattcagctcctgtaagaagcgctggataaaacaagccttagaagaagggatgactcaaacatcatctgtaccccaagagactagaactcagcacctataccaaagcaatgagaatagtagctcttctagtatctgcaaagacaatgcagacttgttgagcccattaaagaaatggaagtctcgctatctgatggagcagaatgtcaccaagttacttcggcctctgtctccagtcacaccaccccctcccaattcaggctcaaagagtccccagctggccacacctggctcatctcacccaggagaagaggagtgtcgaaatggatacagcctcatgttttcaccagtcacatctcttactactgctagtcgctgcaacactcctctacagtttgagctttgtcaccgaaaagacctggatttggcaaaagtaggataccttgactccaacactaacagctgtgctgatagaccttccctactcaactcaggtcattctgacctggctcctcatccctccctcggacccacttctgagactggtttcccaagcagaagtggagatggacatcagaccctcgtgagaaactcagaccaggcatttcggacagagttcaacttgatgtatgcctactcccctttgaatgctatgcctcgagcagatggactgtatcgaggatctcctctagtgggggataggaagcctttacatttggatgggggatattgttcccctgcagaaggattttccagcagatatgaacatggcttaatgaaagacctctctcgtggatccttgtcacctggtggtgaaagggcctgtgaaggagtcccatctgccccccagaacccaccacagaggaaaaaagtatccctgctggagtaccgaaaacggaaacaagaagctaaggaaaattctgctggtgggggaggtgactctgcacagagcaaaagcaagtctgcaggagctgggcaaggcagcagtaactccgtttccgacactggtgcccatggtgtgcagggatcctcagcccgaactccatcttcccctcacaaaaaattctccccatctcattcctctatgtcccatttggaggcggtaagcccatcagattccagaggcacttcttcatctcactgcagacctcaagagaatatcagcagtaggtggatggttcccacatcagtagaacgactccgagaaggagggagcatccccaaggtcctccgaagcagcgtgagggtggcccaaaagggagagccctctcccacatgggagagtaacatcacagagaaagactcagaccctgcagatggagaaggcccagagacattaagctcagcactctctaaaggagcaacagtttacagcccttccagatacagctaccagctcctgcagtgtgatagtcctcggacagaatcacaaagcctccttcagcagagttcctcccccttcagaggacatcctacacagtctccaggatacagttatcgaactactgcactgagacctggaaaccccccctctcacggttcttcagaatcatccctctcttccacgtcctattccagccccgcccaccctgtgtccacagactcgttggccccatttacggggacaccagggtattttagcagccagccacattctggaaacagcactggcagcaatcttccaaggaggagctgcccttctagtgctgctagccctaccctgcagggaccctcagactcgccaacctcagattcagtttctcagtccagcacaggaactctgagttccacctcctttcctcagaactctaggtcgtcattgccatcagacttacggactatcagtctgcccagtgctgggcagtcagctgtctaccaggcctccagggtatctgcggtttccaattcacagcactacccacaccgtgggagtgggggtgtgcaccagtaccgactccagccactgcaagggtcaggagtcaagactcagacgggactttcctagggcttctggatttgggcaaacagaactgaatgagcccatagctgcttccttccagctgcctctggaacctaggccgagcatattgctgaggaacggggggtacaaggtgccagaggattgggtctggtggacaagaaacaagacttgtggtcacaattggcctctggccttggagaaagctgtaaatcttgtctgaagcagagactataaagaagtttctccctgctgtcaagggtacattgttgacaagcaaatggtgtttcggttagtaacggttctaagtgcaatgagttgtgttgaagcctccgtctcccatccttgcctgtagcccgtagtcacttgtgcagtgaggacatctttttaaatttaaaaaaaaaaaaaaaaaaagttttcaaaggaaaaaaagttaaaagagccaatctcaaagccccaagccatctgagtactgttagggttttatgcacttaagaaaaaaggtaggtatgtaaatgttcatcctaagacaaccattccaaaagcaggtatctggccaatgtgtgtccaccaagaatactgtttatctttgtcttaagatcaccaagaaataggcaaggatagtaaagcttggaacctgcaccaactggagggtgcctggctctttgaagaaaagctcatggtcagctcttgattattcgggagcagattatttgagtagattgtctgagcctccaactgttaccatcctactcccccttcccaagctatttcacagctcagtaacccatgaagtaagtagacaagaaaaggaggaatgagacatgatataggccaattgcattgctacttaccagcttttggcaataaatttcattaggaaggataccgagtggtttgggaatgcttcgaattttattttttctactcccaattaatcaggagttgatgatcccatgagcaggaccgcctccatgattggggagcatgcacttgtgactgcagggtaagagtgggaagataggtttgtggagtggcaccgacaggactgtgattgtgtgtgggcctgccccacatttctctgggggatgcttatgtgagagtgggcccagtgaaagagttaccaagccacccacacccctaacactgttctggatgagagatgagagcagaccggcttctccccatcagtgcattgtgcctgttgtacacccctggaggagccctggagccagcccaggtggggtacacaatctttttaaattccatatggttgccagcttatttctttcacttgtttactgtaatatctggcgtgtttttatttatctaattttgtattcagttataaccatggtaggggtagtgaatatatgacaggtgtaatccctggtgctgcagtggaccttcttttcttttggacaagataatactgtgagtttccctccttccttccctctaatttgttttccttttttccccagcctcttgcatccccttcttttctaccctgtcctacaactatcatatgcacagtcttctctctttgtgtgtgactgttacaaaatttcacttttcaaaatcgaaatcaggtgtttgctcaaatgaggggagattttttttttttttttttttttaaatgctgagacctcagcagagtacttttctttttgttgtttcccccacaaacccatcagtctgggagagcattgggagtggaaatcatgttgcctgggatgctggtttctttgtatattatataaaacgtatgtaaatgtctctccatttgggctggggtttgcattctccccttggctatttaaccaaggggagaggccagcgggcaggcggccctcaccctgcctggcacgtgcagagaccccagccactctgtgtgggcagggtgctgtcaagaccagacctcttgggggggtaggggcgggggggtggggggaactcttggaagggaagaagtatcacttctttctcaagtggagtgtttacaccttgctgtaacatttgaactttcacaagagatgtaataattttgataataaaattcttaaccataataatcataaagttgagaa

SEQ ID NO: 376 - DNA, 6463 bp, Homo sapiens
  source 1..6463: mol_type = genomic DNA
ctgtgttggacgtcatgagcattgcaatccctctgggagtcaccacatcagatacatcctactcagatatggctgctggatcagaccctgaatctgtggaggctagtccagcagttaatgagaagagcgtgtattccactcataattatgggaccactcagaggcatgggtgtcgaggactgccttatgctgatcataattacggagcccctcctcctccgacacctcctgcttctccccctgtccagacgatcatccctcgttctgacctgaatggcctgccgtcgcctgtagaggaacgctgtggagacagcccgaactctgaaggagaaactgtacctacctggtgtccttgtggtctttctcaggatggcttccttctcaactgtgacaagtgcaggggaatgagcagggggaaggttattagacttcatcggcggaagcaggacaacatatcaggtggggatagcagtgcaacagaaagctgggatgaggagctttctccttccactgtgttgtatacagcaacacagcacacacctacaagcatcaccttaactgttagaagaaccaaacccaagaagcggaaaaagagtccagaaaagggtcgtgcagcaccaaagacgaagaaaatcaagaattctccctctgaagcacagaatttagatgagaatacaactgagggctgggaaaatcggataagactatggactgaccagtatgaagaagctttcactaatcagtacagtgcagatgtacagaacgcgcttgaacaacacctacattctagcaaggaatttgtgggcaaacctactattttagacactattaataagactgaattggcctgtaataacacagttattggttcccaaatgcagttacagctgggaagagtcactcgtgttcaaaagcaccggaagatcctgagggctgcaagagatttggctttggacactcttataatagagtatcgtgggaaagtcatgttacgacagcaatttgaggtcaatgggcatttcttcaaaaaaccatacccctttgtgctcttctactcaaaattcaatggtgtagagatgtgtgtggatgcccgtactttcggtaatgatgctcggttcatcagaagatcatgtacaccaaatgcagaggtgcgacacatgattgcagatgggatgattcacctgtgcatctatgctgtgtctgccatcaccaaggatgctgaggtcaccatagcatttgattatgagtatagtaactgtaattataaagtggactgtgcctgtcacaagggaaaccggaattgtcctatacaaaaaaggaatcctaatgctacagaactgccactcctaccacctcctccaagcctacccaccattggagcagagactagacgtagaaaagcacgacggaaagagctagagatggagcagcagaatgaggcttcagaggagaataatgaccagcaatcacaagaagttccagaaaaagtaactgtatccagtgatcatgaggaagtagacaatccagaagaaaaaccagaagaagagaaagaagaggttatagatgaccaggagaacctagctcatagcaggaggaccagggaagatagaaaggtagaagccatcatgcatgcttttgaaaacttagagaaaagaaagaagcggcgggatcagcccttggaacagagcaactctgatgtagagattactacaaccacctcagagactcctgttggtgaagagacaaaaactgaagcccctgaatctgaagttagcaactctgtttcaaatgttaccatcccaagcaccccacagagtgttggtgtgaatacccggaggtcttcccaagcaggggatattgctgcagaaaaactagtccccaagccacctccagcaaagccttctaggccccggccgaagagtcgaatttctcggtacaggaccagttcagcccaaagactaaagcgtcagaagcaggccaatgcacagcaggcagaattgtcacaagctgccttggaagagggaggaagtaacagtttagtaactcctactgaagctggaagtctagacagttcaggagaaaacaggccattaacagggtctgacccaactgtggtgtcaattactggatcccatgtcaaccgtgctgcatctaaataccccaaaaccaaaaagtatctagttacagaatggttgaatgacaaagcagagaagcaagagtgccctgttgagtgccctttacgtatcacaacggatccaactgtactggcaacgaccctaaacatgttaccaggtcttatccattccccgttaatttgcaccacccccaaacactacattcgctttggctcaccctttatccctgagagacgtcgaaggccccttctgcctgatggcacattcagctcctgtaagaagcgctggataaaacaagccttagaagaagggatgactcaaacatcatctgtaccccaagagactagaactcagcacctataccaaagcaatgagaatagtagctcttctagtatctgcaaagacaatgcagacttgttgagcccattaaagaaatggaagtctcgctatctgatggagcagaatgtcaccaagttacttcggcctctgtctccagtcacaccaccccctcccaattcaggctcaaagagtccccagctggccacacctggctcatctcacccaggagaagaggagtgtcgaaatggatacagcctcatgttttcaccagtcacatctcttactactgctagtcgctgcaacactcctctacagtttgagctttgtcaccgaaaagacctggatttggcaaaagtaggataccttgactccaacactaacagctgtgctgatagaccttccctactcaactcaggtcattctgacctggctcctcatccctccctcggacccacttctgagactggtttcccaagcagaagtggagatggacatcagaccctcgtgagaaactcagaccaggcatttcggacagagttcaacttgatgtatgcctactcccctttgaatgctatgcctcgagcagatggactgtatcgaggatctcctctagtgggggataggaagcctttacatttggatgggggatattgttcccctgcagaaggattttccagcagatatgaacatggcttaatgaaagacctctctcgtggatccttgtcacctggtggtgaaagggcctgtgaaggagtcccatctgccccccagaacccaccacagaggaaaaaagtatccctgctggagtaccgaaaacggaaacaagaagctaaggaaaattctgctggtgggggaggtgactctgcacagagcaaaagcaagtctgcaggagctgggcaaggcagcagtaactccgtttccgacactggtgcccatggtgtgcagggatcctcagcccgaactccatcttcccctcacaaaaaattctccccatctcattcctctatgtcccatttggaggcggtaagcccatcagattccagaggcacttcttcatctcactgcagacctcaagagaatatcagcagtaggtggatggttcccacatcagtagaacgactccgagaaggagggagcatccccaaggtcctccgaagcagcgtgagggtggcccaaaagggagagccctctcccacatgggagagtaacatcacagagaaagactcagaccctgcagatggagaaggcccagagacattaagctcagcactctctaaaggagcaacagtttacagcccttccagatacagctaccagctcctgcagtgtgatagtcctcggacagaatcacaaagcctccttcagcagagttcctcccccttcagaggacatcctacacagtctccaggatacagttatcgaactactgcactgagacctggaaaccccccctctcacggttcttcagaatcatccctctcttccacgtcctattccagccccgcccaccctgtgtccacagactcgttggccccatttacggggacaccagggtattttagcagccagccacattctggaaacagcactggcagcaatcttccaaggaggagctgcccttctagtgctgctagccctaccctgcagggaccctcagactcgccaacctcagattcagtttctcagtccagcacaggaactctgagttccacctcctttcctcagaactctaggtcgtcattgccatcagacttacggactatcagtctgcccagtgctgggcagtcagctgtctaccaggcctccagggtatctgcggtttccaattcacagcactacccacaccgtgggagtgggggtgtgcaccagtaccgactccagccactgcaagggtcaggagtcaagactcagacgggactttcctagggcttctggatttgggcaaacagaactgaatgagcccatagctgcttccttccagctgcctctggaacctaggccgagcatattgctgaggaacggggggtacaaggtgccagaggattgggtctggtggacaagaaacaagacttgtggtcacaattggcctctggccttggagaaagctgtaaatcttgtctgaagcagagactataaagaagtttctccctgctgtcaagggtacattgttgacaagcaaatggtgtttcggttagtaacggttctaagtgcaatgagttgtgttgaagcctccgtctcccatccttgcctgtagcccgtagtcacttgtgcagtgaggacatctttttaaatttaaaaaaaaaaaaaaaaaaagttttcaaaggaaaaaaagttaaaagagccaatctcaaagccccaagccatctgagtactgttagggttttatgcacttaagaaaaaaggtaggtatgtaaatgttcatcctaagacaaccattccaaaagcaggtatctggccaatgtgtgtccaccaagaatactgtttatctttgtcttaagatcaccaagaaataggcaaggatagtaaagcttggaacctgcaccaactggagggtgcctggctctttgaagaaaagctcatggtcagctcttgattattcgggagcagattatttgagtagattgtctgagcctccaactgttaccatcctactcccccttcccaagctatttcacagctcagtaacccatgaagtaagtagacaagaaaaggaggaatgagacatgatataggccaattgcattgctacttaccagcttttggcaataaatttcattaggaaggataccgagtggtttgggaatgcttcgaattttattttttctactcccaattaatcaggagttgatgatcccatgagcaggaccgcctccatgattggggagcatgcacttgtgactgcagggtaagagtgggaagataggtttgtggagtggcaccgacaggactgtgattgtgtgtgggcctgccccacatttctctgggggatgcttatgtgagagtgggcccagtgaaagagttaccaagccacccacacccctaacactgttctggatgagagatgagagcagaccggcttctccccatcagtgcattgtgcctgttgtacacccctggaggagccctggagccagcccaggtggggtacacaatctttttaaattccatatggttgccagcttatttctttcacttgtttactgtaatatctggcgtgtttttatttatctaattttgtattcagttataaccatggtaggggtagtgaatatatgacaggtgtaatccctggtgctgcagtggaccttcttttcttttggacaagataatactgtgagtttccctccttccttccctctaatttgttttccttttttccccagcctcttgcatccccttcttttctaccctgtcctacaactatcatatgcacagtcttctctctttgtgtgtgactgttacaaaatttcacttttcaaaatcgaaatcaggtgtttgctcaaatgaggggagattttttttttttttttttttttaaatgctgagacctcagcagagtacttttctttttgttgtttcccccacaaacccatcagtctgggagagcattgggagtggaaatcatgttgcctgggatgctggtttctttgtatattatataaaacgtatgtaaatgtctctccatttgggctggggtttgcattctccccttggctatttaaccaaggggagaggccagcgggcaggcggccctcaccctgcctggcacgtgcagagaccccagccactctgtgtgggcagggtgctgtcaagaccagacctcttgggggggtaggggcgggggggtggggggaactcttggaagggaagaagtatcacttctttctcaagtggagtgtttacaccttgctgtaacatttgaactttcacaagagatgtaataattttgataataaaattcttaaccataataatcataaagttgagaa

SEQ ID NO: 377 - DNA, 3428 bp, Homo sapiens
  source 1..3428: mol_type = genomic DNA
agagatgtgtgtggatgcccgtactttcggtaatgatgctcggttcatcagaagatcatgtacaccaaatgcagaggtgcgacacatgattgcagatgggatgattcacctgtgcatctatgctgtgtctgccatcaccaaggatgctgaggtcaccatagcatttgattatgagtatagtaactgtaattataaagtggactgtgcctgtcacaagggaaaccggaattgtcctatacaaaaaaggaatcctaatgctacagaactgccactcctaccacctcctccaagcctacccaccattggagcagagactagacgtagaaaagcacgacggaaagagctagagatggagcagcagaatgaggcttcagaggagaataatgaccagcaatcacaagaagttccagaaaaagtaactgtatccagtgatcatgagagcttgagtacagctgaatattgcctctatcttaaaggaagtagacaatccagaagaaaaaccagaagaagagaaagaagaggttatagatgaccaggagaacctagctcatagcaggaggaccagggaagatagaaaggtagaagccatcatgcatgcttttgaaaacttagagaaaagaaagaagcggcgggatcagcccttggaacagagcaactctgatgtagagattactacaaccacctcagagactcctgttggtgaagagacaaaaactgaagcccctgaatctgaagttagcaactctgtttcaaatgttaccatcccaagcaccccacagagtgttggtgtgaatacccggaggtcttcccaagcaggggatattgctgcagaaaaactagtccccaagccacctccagcaaagccttctaggccccggccgaagagtcgaatttctcggtacaggaccagttcagcccaaagactaaagcgtcagaagcaggccaatgcacagcaggcagaattgtcacaagctgccttggaagagggaggaagtaacagtttagtaactcctactgaagctggaagtctagacagttcaggagaaaacaggccattaacagggtctgacccaactgtggtgtcaattactggatcccatgtcaaccgtgctgcatctaaataccccaaaaccaaaaagtatctagttacagaatggttgaatgacaaagcagagaagcaagagtgccctgttgagtgccctttacgtatcacaacggatccaactgtactggcaacgaccctaaacatgttaccaggtcttatccattccccgttaatttgcaccacccccaaacactacattcgctttggctcaccctttatccctgagagacgtcgaaggccccttctgcctgatggcacattcagctcctgtaagaagcgctggataaaacaagccttagaagaagggatgactcaaacatcatctgtaccccaagagactagaactcagcacctataccaaagcaatgagaatagtagctcttctagtatctgcaaagacaatgcagacttgttgagcccattaaagaaatggaagtctcgctatctgatggagcagaatgtcaccaagttacttcggcctctgtctccagtcacaccaccccctcccaattcaggctcaaagagtccccagctggccacacctggctcatctcacccaggagaagaggagtgtcgaaatggatacagcctcatgttttcaccagtcacatctcttactactgctagtcgctgcaacactcctctacagtttgagctttgtcaccgaaaagacctggatttggcaaaagtaggataccttgactccaacactaacagctgtgctgatagaccttccctactcaactcaggtcattctgacctggctcctcatccctccctcggacccacttctgagactggtttcccaagcagaagtggagatggacatcagaccctcgtgagaaactcagaccaggcatttcggacagagttcaacttgatgtatgcctactcccctttgaatgctatgcctcgagcagatggactgtatcgaggatctcctctagtgggggataggaagcctttacatttggatgggggatattgttcccctgcagaaggattttccagcagatatgaacatggcttaatgaaagacctctctcgtggatccttgtcacctggtggtgaaagggcctgtgaaggagtcccatctgccccccagaacccaccacagaggaaaaaagtatccctgctggagtaccgaaaacggaaacaagaagctaaggaaaattctgctggtgggggaggtgactctgcacagagcaaaagcaagtctgcaggagctgggcaaggcagcagtaactccgtttccgacactggtgcccatggtgtgcagggatcctcagcccgaactccatcttcccctcacaaaaaattctccccatctcattcctctatgtcccatttggaggcggtaagcccatcagattccagaggcacttcttcatctcactgcagacctcaagagaatatcagcagtaggtggatggttcccacatcagtagaacgactccgagaaggagggagcatccccaaggtcctccgaagcagcgtgagggtggcccaaaagggagagccctctcccacatgggagagtaacatcacagagaaagactcagaccctgcagatggagaaggcccagagacattaagctcagcactctctaaaggagcaacagtttacagcccttccagatacagctaccagctcctgcagtgtgatagtcctcggacagaatcacaaagcctccttcagcagagttcctcccccttcagaggacatcctacacagtctccaggatacagttatcgaactactgcactgagacctggaaaccccccctctcacggttcttcagaatcatccctctcttccacgtcctattccagccccgcccaccctgtgtccacagactcgttggccccatttacggggacaccagggtattttagcagccagccacattctggaaacagcactggcagcaatcttccaaggaggagctgcccttctagtgctgctagccctaccctgcagggaccctcagactcgccaacctcagattcagtttctcagtccagcacaggaactctgagttccacctcctttcctcagaactctaggtcgtcattgccatcagacttacggactatcagtctgcccagtgctgggcagtcagctgtctaccaggcctccagggtatctgcggtttccaattcacagcactacccacaccgtgggagtgggggtgtgcaccagtaccgactccagccactgcaagggtcaggagtcaagactcagacgggactttcctagggcttctggatttgggcaaacagaactgaatgagcccatagctgcttccttccagctgcctct

SEQ ID NO: 378 - DNA, 579 bp, Homo sapiens
  source 1..579: mol_type = genomic DNA
aggaaacgccgtggcgccgcgttgggcctaactcgagtcctgccgcctcccgggagtgccgtgcgccgcagcccgggcccaggccccggcagcgcctgggacaaggtcttcagaactactagcagataatttggggggacttcatattcagaagtctatataaaggattcctcatgtccataacatgttggatgaggctctgcagctcacccccactctcagagtggtcagtctccattaattggaccccgtgatttccaatctctgctgtgttggacgtcatgagcattgcaatccctctgggagtcaccacatcagatacatcctactcagatatggctgctggatcagaggtatcctgtcttggtagtgaatggaagagggcctggtccctggggcagtgcagaaggcactttgatcatctcactcactgcaaatgtcatgtgaggtttcatggaagtattaagagatccaattaagaagaatagttctgagtctaaaccagcccagagtggcttctctaggggaaactccccgctcagctgccctgaatctgtggaggctagtccagcagttaat

SEQ ID NO: 379 - DNA, 1323 bp, Homo sapiens
  source 1..1323: mol_type = genomic DNA
caaccgtgctgcatctaaataccccaaaaccaaaaagtatctagttacagaatggttgaatgacaaagcagagaagcaagagtgccctgttgagtgccctttacgtatcacaacggatccaactgtactggcaacgaccctaaacatgttaccaggtcttatccattccccgttaatttgcaccacccccaaacactacattcgctttggctcaccctttatccctgagagacgtcgaaggccccttctgcctgatggcacattcagctcctgtaagaagcgctggataaaacaagccttagaagaagggatgactcaaacatcatctgtaccccaagagactagaactcagcacctataccaaagcaatgagaatagtagctcttctagtatctgcaaagacaatgcagacttgttgagcccattaaagaaatggaagtctcgctatctgatggagcagaatgtcaccaagttacttcggcctctgtctccagtcacaccaccccctcccaattcaggctcaaagagtccccagctggccacacctggctcatctcacccaggagaagaggagtgtcgaaatggatacagcctcatgttttcaccagtcacatctcttactactgctagtcgctgcaacactcctctacagtttgagaacatatcctcccctgagagttcccctgcgcataggcccgagtccctgtcacccgagctttgtcaccgaaaagacctggatttggcaaaagtaggataccttgactccaacactaacagctgtgctgatagaccttccctactcaactcaggtcattctgacctggctcctcatccctccctcggacccacttctgagactggtttcccaagcagaagtggagatggacatcagaccctcgtgagaaactcagaccaggcatttcggacagagttcaacttgatgtatgcctactcccctttgaatgctatgcctcgagcagatggactgtatcgaggatctcctctagtgggggataggaagcctttacatttggatgggggatattgttcccctgcagaaggattttccagcagatatgaacatggcttaatgaaagacctctctcgtggatccttgtcacctggtggtgaaagggcctgtgaaggagtcccatctgccccccagaacccaccacagaggaaaaaagtatccctgctggagtaccgaaaacggaaacaagaagctaaggaaaattctgctggtgggggaggtgactctgcacagagcaaaagcaagtctgcaggagctgggcaaggcagcagtaactccgtttccgacactgg

SEQ ID NO: 380 - DNA, 1824 bp, Homo sapiens
  source 1..1824: mol_type = genomic DNA
agtggcgtttccgctcgggcagcgggctgagtgagctgccgccgccgccgccgccgccgccgccgccgccgctgccgggggaggggcggccgccgcccgcctgcgctcagagactcacgcagccccagtcccgccagtccgccaacacagtagtgccggcccccctctttccctggccctgccccccctccccgcctttggctcgctccgcctttctgccccccacccccacctcacgggtacgggccattcccggccaggaaacgccgtggcgccgcgttgggcctaactcgagtcctgccgcctcccgggagtgccgtgcgccgcagcccgggcccaggccccggcagcgcctgggacaaggtcttcagaactactagcagataatttggggggacttcatattcagaagtctatataaaggattcctcatgtccataacatgttggatgaggctctgcagctcacccccactctcagagtggtcagtctccattaattggaccccgtgatttccaatctctgctgtgttggacgtcatgagcattgcaatccctctgggagtcaccacatcagatacatcctactcagatatggctgctggatcagaaaaggaagtggaagccccctacctttcaagacgaagtggcactacaccaggatgtgaaagtccagcgaaagagacccaaggggcctagggggcagcacacccccagaagccaagtctattccaggcagtaccagggattagggtctgggctggaaaaatcctggtgttttgaatatgttcaggtccagttcagactcttgatcccacagccacttcttgagtgagggtatcctgtcttggtagtgaatggaagagggcctggtccctggggcagtgcagaaggcactttgatcatctcactcactgcaaatgtcatgtgaggtttcatggaagtattaagagatccaattaagaagaatagttctgagtctaaaccagcccagagtggcttctctaggggaaactccccgctcagctgccctgaatctgtggaggctagtccagcagttaatgagaagagcgtgtattccactcataattatgggaccactcagaggcatgggtgtcgaggactgccttatgctgatcataattacggagcccctcctcctccgacacctcctgcttctccccctgtccagacgatcatccctcgttctgacctgaatggcctgccgtcgcctgtagaggaacgctgtggagacagcccgaactctgaaggagaaactgtacctacctggtgtccttgtggtctttctcaggatggcttccttctcaactgtgacaagtgcaggggaatgagcagggggaaggttattagacttcatcggcggaagcaggacaacatatcaggtggggatagcagtgcaacagaaagctgggatgaggagctttctccttccactgtgttgtatacagcaacacagcacacacctacaagcatcaccttaactgttagaagaaccaaacccaagaagcggaaaaagagtccagaaaagggtcgtgcagcaccaaagacgaagaaaatcaagaattctccctctgaagcacagaatttagatgagaatacaactgagggctgggaaaatcggataagactatggactgaccagtatgaagaagctttcactaatcagtacagtgcagatgtacagaacgcgcttgaacaacacctacattctagcaaggaatttgtgggcaaacctactattttagacactattaataagactgaattggcctgtaataacacagttattggttcccaaatgcag

SEQ ID NO: 381 - DNA, 3478 bp, Homo sapiens
  source 1..3478: mol_type = genomic DNA
ctaactcgagtcctgccgcctcccgggagtgccgtgcgccgcagcccgggcccaggccccggcagcgcctgggacaaggtcttcagaactactagcagataatttggggggacttcatattcagaagtctatataaaggattcctcatgtccataacatgttggatgaggctctgcagctcacccccactctcagagtggtcagtctccattaattggaccccgtgatttccaatctctgctgtgttggacgtcatgagcattgcaatccctctgggagtcaccacatcagatacatcctactcagatatggctgctggatcagaaaaggaagtggaagccccctacctttcaagacgaagtggcactacaccaggatgtgaaagtccagcgaaagagacccaaggggcctagggggcagcacacccccagaagccaagtctattccaggcagtaccagggattagggtctgggctggaaaaatcctggtgttttgaatatgttcaggtccagttcagactcttgatcccacagccacttcttgagtgagccctgaatctgtggaggctagtccagcagttaatgagaagagcgtgtattccactcataattatgggaccactcagaggcatgggtgtcgaggactgccttatgctcatgacgaagttgccccttttgcacttccctgactccagcggacgtctagccctgcatcattgttcttgtttttatgtcccagttgaccttggcattttgttttatcactttcctggttgaagccaaaaaacaaagggatcataattacggagcccctcctcctccgacacctcctgcttctccccctgtccagacgatcatccctcgttctgacctgaatggcctgccgtcgcctgtagaggaacgctgtggagacagcccgaactctgaaggagaaactgtacctacctggtgtccttgtggtctttctcaggatggcttccttctcaactgtgacaagtgcaggggaatgagcagggggaaggttattagacttcatcggcggaagcaggacaacatatcaggtggggatagcagtgcaacagaaagctgggatgaggagctttctccttccactgtgttgtatacagcaacacagcacacacctacaagcatcaccttaactgttagaagaaccaaacccaagaagcggaaaaagagtccagaaaagggtcgtgcagcaccaaagacgaagaaaatcaagaattctccctctgaagcacagaatttagatgagaatacaactgagggctgggaaaatcggataagactatggactgaccagtatgaagaagctttcactaatcagtacagtgcagatgtacagaacgcgcttgaacaacacctacattctagcaaggaatttgtgggcaaacctactattttagacactattaataagactgaattggcctgtaataacacagttattggttcccaaatgcagttacagctgggaagagtcactcgtgttcaaaagcaccggaagatcctgagggctgcaagagatttggctttggacactcttataatagagtatcgtgggaaagtcatgttacgacagcaatttgaggtcaatgggcatttcttcaaaaaaccatacccctttgtgctcttctactcaaaattcaatggtgtagagatgtgtgtggatgcccgtactttcggtaatgatgctcggttcatcagaagatcatgtacaccaaatgcagaggtgcgacacatgattgcagatgggatgattcacctgtgcatctatgctgtgtctgccatcaccaaggatgctgaggtcaccatagcatttgattatgagtatagtaactgtaattataaagtggactgtgcctgtcacaagggaaaccggaattgtcctatacaaaaaaggaatcctaatgctacagaactgccactcctaccacctcctccaagcctacccaccattggagcagagactagacgtagaaaagcacgacggaaagagctagagatggagcagcagaatgaggcttcagaggagaataatgaccagcaatcacaagaagttccagaaaaagtaactgtatccagtgatcatgaggaagtagacaatccagaagaaaaaccagaagaagagaaagaagaggttatagatgaccaggagaacctagctcatagcaggaggaccagggaagatagaaaggtagaagccatcatgcatgcttttgaaaacttagagaaaagaaagaagcggcgggatcagcccttggaacagagcaactctgatgtagagattactacaaccacctcagagactcctgttggtgaagagacaaaaactgaagcccctgaatctgaagttagcaactctgtttcaaatgttaccatcccaagcaccccacagagtgttggtgtgaatacccggaggtcttcccaagcaggggatattgctgcagaaaaactagtccccaagccacctccagcaaagccttctaggccccggccgaagagtcgaatttctcggtacaggaccagttcagcccaaagactaaagcgtcagaagcaggccaatgcacagcaggcagaattgtcacaagctgccttggaagagggaggaagtaacagtttagtaactcctactgaagctggaagtctagacagttcaggagaaaacaggccattaacagggtctgacccaactgtggtgtcaattactggatcccatgtcaaccgtgctgcatctaaataccccaaaaccaaaaagtatctagttacagaatggttgaatgacaaagcagagaagcaagagtgccctgttgagtgccctttacgtatcacaacggatccaactgtactggcaacgaccctaaacatgttaccaggtcttatccattccccgttaatttgcaccacccccaaacactacattcgctttggctcaccctttatccctgagagacgtcgaaggccccttctgcctgatggcacattcagctcctgtaagaagcgctggataaaacaagccttagaagaagggatgactcaaacatcatctgtaccccaagagactagaactcagcacctataccaaagcaatgagaatagtagctcttctagtatctgcaaagacaatgcagacttgttgagcccattaaagaaatggaagtctcgctatctgatggagcagaatgtcaccaagttacttcggcctctgtctccagtcacaccaccccctcccaattcaggctcaaagagtccccagctggccacacctggctcatctcacccaggagaagaggagtgtcgaaatggatacagcctcatgttttcaccagtcacatctcttactactgctagtcgctgcaacactcctctacagtttgaggtgatttgggtttggttgctgggagtgctggatatgaaaatcatcatttgtaccttctcatttcaaatataataccattcc

SEQ ID NO: 382 - DNA, 1074 bp, Homo sapiens
  source 1..1074: mol_type = genomic DNA
tcagcccgaactccatcttcccctcacaaaaaattctccccatctcattcctctatgtcccatttggaggcggtaagcccatcagattccagaggcacttcttcatctcactgcagacctcaagagaatatcagcagtaggtggatggttcccacatcagtagaacgactccgagaaggagggagcatccccaaggtcctccgaagcagcgtgagggtggcccaaaagggagagccctctcccacatgggagagtaacatcacagagaaagactcaggtgagcccatggccttctgctgccaccacattcagggacacatgagccgagtcctgtacagttcatgcctagtgctgagttgaggtgagtcagtttctgatgcagttgggctccaccgcatgctaggttccagcccacttatgctcatttgggctaccacatttgtaagatctagcattgcttgctctctgtctgctcttttttccccaaggaatacctttctgtaactctcatctctccaaagtcctggaaatctacctcgatgaaggatgaagagaaagaagacgggaatcacatcaggcatttagaacatagcccataattaaccactcattttgcccttctggcatgctgcactcacccaatttgtcacaaagagagcagtacgggttggtgatggcactggtgatttaaatgaaaaatggctctttcttacttattctaagaagccaagttgatttttttttatatatgttaccttccagaccctgcagatggagaaggcccagagacattaagctcagcactctctaaaggagcaacagtttacagcccttccagatacagctaccagctcctgcagtgtgatagtcctcggacagaatcacaaagcctccttcagcagagttcctcccccttcagaggacatcctacacagtctccaggatacagttatcgaactactgcactgagacctggaaaccccccctctcacggttcttcagaatcatccctctcttccacgtcctattccagccccgcccaccctgtgtccacagactcgttggccccattta

SEQ ID NO: 383 - DNA, 685 bp, Homo sapiens
  source 1..685: mol_type = genomic DNA
acgggccattcccggccaggaaacgccgtggcgccgcgttgggcctaactcgagtcctgccgcctcccgggagtgccgtgcgccgcagcccgggcccaggccccggcagcgcctgggacaaggtcttcagaactactagcagataatttggggggacttcatattcagaagtctatataaaggattcctcatgtccataacatgttggatgaggctctgcagctcacccccactctcagagtggtcagtctccattaattggaccccgtgatttccaatctctgctgtgttggacgtcatgagcattgcaatccctctgggagtcaccacatcagatacatcctactcagatatggctgctggatcagagtaagtgctactttctaggtagtaggtacattatcagtctgtgtggagacagccttcttatggatagctaataggataatatgtagtattttcttaaccagatcctattccactgtaattaacattagacctttccctttacccccattgaaggtggtggaaaaaaggaattagaaggggaaggaagagttttcagaggggtatttctgggcaaataattaatagaaccaaagttgcaaagtaggaattcattttcatttgttttaatgggtggagaaaattggaataaagtaggtgttactacctgcttctgtag

SEQ ID NO: 384 - DNA, 593 bp, Homo sapiens
  source 1..593: mol_type = genomic DNA
atacatttctttctgttttacaaagtcaaaaacatcctttgctggttttgcaccagagaataggggttagttatcatctgtgtttaccatgtggcctcacatgagttaacagtttaaagcactagagattgttatagagagttttaagctaccagaataaaacagattgattttttctcagagcttgagtacagctgaatattgcctctatcttaaaggaagtagacaatccagaagaaaaaccagaagaagagaaagaagaggttatagatgaccaggagaacctagctcatagcaggaggaccagggaagatagaaaggtagaagccatcatgcatgcttttgaaaacttagagaaaagaaagaagcggcgggatcagcccttggaacagagcaactctgatgtagagattactacaaccacctcagagactcctgttggtgaagagacaaaaactgaagcccctgaatctgaagttagcaactctgtttcaaatgttaccatcccaagcaccccacagagtgttggtgtgaatacccggaggtcttcccaagcaggggatattgctgcagaaaaactagtccccaagcca

SEQ ID NO: 385 - DNA, 248 bp, Homo sapiens
  source 1..248: mol_type = genomic DNA
gggctggaaaaatcctggtgttttgaatatgttcaggtccagttcagactcttgatcccacagccacttcttgagtgagacttgcacatgaagtgcatatgttcatatttacccgtttggagatgggtaagatacaaccagcatagctccatctccatggccatctttgatttcatgcaactttcctttttcctgtccccctcccaccaaaaaaaaatccattcctaataaacagctatcatgtttca

SEQ ID NO: 386 - DNA, 4038 bp, Homo sapiens
  source 1..4038: mol_type = genomic DNA
cttagccaggcattgtggcgtgtgcctgtattcccaggtactcaggaggctgagacaggagaattgcttgaacccgggaggcagaggttgccgtgagccgagatcacgccactccactccagcctgagcgacagagcaagactgtatctcaaaaaaaagatgtgaaagtagagattttaccctgatttctaacatctcaaggtttctccacatatttaagaaagtattataaattttcaagccagtgcagtataatagtttcagatgaaatgaaggggttaaataacagattaccataactccttaaataaataatagattaccataactccaaatggagagaaagtatggtttttttctctcttacggaaagttcatggtctttatgaaaaatccaaccagaagccttttcacacaggtgcgacacatgattgcagatgggatgattcacctgtgcatctatgctgtgtctgccatcaccaaggatgctgaggtcaccatagcatttgattatgagtatagtaactgtaattataaagtggactgtgcctgtcacaagggaaaccggaattgtcctatacaaaaaaggaatcctaatgctacagaactgccactcctaccacctcctccaagcctacccaccattggagcagagactagacgtagaaaagcacgacggaaagagctagagatggagcagcagaatgaggcttcagaggagaataatgaccagcaatcacaagaagttccagaaaaagtaactgtatccagtgatcatgaggaagtagacaatccagaagaaaaaccagaagaagagaaagaagaggttatagatgaccaggagaacctagctcatagcaggaggaccagggaagatagaaaggtagaagccatcatgcatgcttttgaaaacttagagaaaagaaagaagcggcgggatcagcccttggaacagagcaactctgatgtagagattactacaaccacctcagagactcctgttggtgaagagacaaaaactgaagcccctgaatctgaagttagcaactctgtttcaaatgttaccatcccaagcaccccacagagtgttggtgtgaatacccggaggtcttcccaagcaggggatattgctgcagaaaaactagtccccaagccacctccagcaaagccttctaggccccggccgaagagtcgaatttctcggtacaggaccagttcagcccaaagactaaagcgtcagaagcaggccaatgcacagcaggcagaattgtcacaagctgccttggaagagggaggaagtaacagtttagtaactcctactgaagctggaagtctagacagttcaggagaaaacaggccattaacagggtctgacccaactgtggtgtcaattactggatcccatgtcaaccgtgctgcatctaaataccccaaaaccaaaaagtatctagttacagaatggttgaatgacaaagcagagaagcaagagtgccctgttgagtgccctttacgtatcacaacggatccaactgtactggcaacgaccctaaacatgttaccaggtcttatccattccccgttaatttgcaccacccccaaacactacattcgctttggctcaccctttatccctgagagacgtcgaaggccccttctgcctgatggcacattcagctcctgtaagaagcgctggataaaacaagccttagaagaagggatgactcaaacatcatctgtaccccaagagactagaactcagcacctataccaaagcaatgagaatagtagctcttctagtatctgcaaagacaatgcagacttgttgagcccattaaagaaatggaagtctcgctatctgatggagcagaatgtcaccaagttacttcggcctctgtctccagtcacaccaccccctcccaattcaggctcaaagagtccccagctggccacacctggctcatctcacccaggagaagaggagtgtcgaaatggatacagcctcatgttttcaccagtcacatctcttactactgctagtcgctgcaacactcctctacagtttgagctttgtcaccgaaaagacctggatttggcaaaagtaggataccttgactccaacactaacagctgtgctgatagaccttccctactcaactcaggtcattctgacctggctcctcatccctccctcggacccacttctgagactggtttcccaagcagaagtggagatggacatcagaccctcgtgagaaactcagaccaggcatttcggacagagttcaacttgatgtatgcctactcccctttgaatgctatgcctcgagcagatggactgtatcgaggatctcctctagtgggggataggaagcctttacatttggatgggggatattgttcccctgcagaaggattttccagcagatatgaacatggcttaatgaaagacctctctcgtggatccttgtcacctggtggtgaaagggcctgtgaaggagtcccatctgccccccagaacccaccacagaggaaaaaagtatccctgctggagtaccgaaaacggaaacaagaagctaaggaaaattctgctggtgggggaggtgactctgcacagagcaaaagcaagtctgcaggagctgggcaaggcagcagtaactccgtttccgacactggtgcccatggtgtgcagggatcctcagcccgaactccatcttcccctcacaaaaaattctccccatctcattcctctatgtcccatttggaggcggtaagcccatcagattccagaggcacttcttcatctcactgcagacctcaagagaatatcagcagtaggtggatggttcccacatcagtagaacgactccgagaaggagggagcatccccaaggtcctccgaagcagcgtgagggtggcccaaaagggagagccctctcccacatgggagagtaacatcacagagaaagactcagaccctgcagatggagaaggcccagagacattaagctcagcactctctaaaggagcaacagtttacagcccttccagatacagctaccagctcctgcagtgtgatagtcctcggacagaatcacaaagcctccttcagcagagttcctcccccttcagaggacatcctacacagtctccaggatacagttatcgaactactgcactgagacctggaaaccccccctctcacggttcttcagaatcatccctctcttccacgtcctattccagccccgcccaccctgtgtccacagactcgttggccccatttacggggacaccagggtattttagcagccagccacattctggaaacagcactggcagcaatcttccaaggaggagctgcccttctagtgctgctagccctaccctgcagggaccctcagactcgccaacctcagattcagtttctcagtccagcacaggaactctgagttccacctcctttcctcagaactctaggtcgtcattgccatcagacttacggactatcagtctgcccagtgctgggcagtcagctgtctaccaggcctccagggtatctgcggtttccaattcacagcactacccacaccgtgggagtgggggtgtgcaccagtaccgactccagccactgcaagggtcaggagtcaagactcagacgggactttcctagggcttctggatttgggcaaacagaactgaatgagcccatagctgcttccttccagctgcctctggaacctaggccgagcatattgctgaggaacggggggtacaaggtgccagaggattgggtctggtggacaagaaacaagacttgtggtcacaattggcctctggccttggagaaagctgtaaatcttgtctgaagcagagactataaagaagtttctccctgctgtcaagggtacattgttgacaagcaaatggtgtttcggttagtaacggttctaagtgcaatgagttgtgttgaagcctccgtctcccatccttgcctgtagcccgtagtcacttgtgcagtgaggacatctttttaaattt

SEQ ID NO: 387 - DNA, 284 bp, Homo sapiens
  source 1..284: mol_type = genomic DNA
atatatgttaccttccagaccctgcagatggagaaggcccagagacattaagctcagcactctctaaaggagcaacagtttacagcccttccagatacagctaccagctcctgcagtgtgatagtcctcggacagaatcacaaagcctccttcagcagagttcctcccccttcagaggacatcctacacagtctccaggatacagttatcgaactactgcactgagacctggaaaccccccctctcacggttcttcagaatcatccctctcttccacgtcctat

SEQ ID NO: 388 - DNA, 1415 bp, Homo sapiens
  source 1..1415: mol_type = genomic DNA
gttcataaaacactttttgtttgtcttctctgtgagtgaccagggagatcatacaggtcttgtgctttcagcaagtcatatagagaagagactgtcagaatgatgatacagagactgttggccatttctgaaaccaattaaaaagatggggtcttcagaactactagcagataatttggggggacttcatattcagaagtctatataaaggtgactgacccaagattcctcatgtccataacatgttggatgaggctctgcagctcacccccactctcagagtggtcagtctccattaattggaccccgtgatttccaatctctgctgtgttggacgtcatgagcattgcaatccctctgggagtcaccacatcagatacatcctactcagatatggctgctggatcagaaaaggaagtggaagccccctacctttcaagacgaagtggcactacaccaggatgtgaaagtccagcgaaagagacccaaggggcctagggggcagcacacccccagaagccaagtctattccaggcagtaccagggattagggtctgggctggaaaaatcctggtgttttgaatatgttcaggtccagttcagactcttgatcccacagccacttcttgagtgaggtgggtgttgctctaattcccctgtttctcttgccattttcacagtccctggggattcttcccccttcagcaaagcaaagcaactgtaccagatttctgggttgaatgacatccctgattaataagtggttttcttccttaaaacagaatattattaaagagcatgtatatttcttcataaagccacctaatataacttacctgtttactgagttccttaaagaggaagacttaaagctaccctgagaaatagtatataatattctggggtagtctaaaatgaaaagcagtgtttgggcttattcccatataaaaaggagaaaggagggttgggggtggggaagggttgattttgtttcttctagagcttttttcttcttttgtttttgtttgttttgttttgtttgcatgcaaaaggtatttagttatgtcagtaactgagacttacttaaccattttacaactctttccccaaataaagtacttaaaactctccctgcattagtaggtagccagtttgtattgtgtttataggtttttataaagtcagctactaacctggtactatgtagattgtctaactgtatagatagatagcattaacatttgtgagaaatttcaacaaagaggttaaaccaatacgtttggaattgctggataaaagacccagagcagttaatcttacaattggtgttttccccaaagtatagacatgactgcccgtaaatactgctggggagtctaggactaattccagaaataaaaatacttctggtctac

SEQ ID NO: 389 - DNA, 584 bp, Homo sapiens
  source 1..584: mol_type = genomic DNA
ggctcaccctttatccctgagagacgtcgaaggccccttctgcctgatggcacattcagctcctgtaagaagatctggattcaggctgccttcctcagtgtctgccattgccctcctccactggcatcacgtacatgaggatgctgcatgtagattatttgatgtgatgaagtctccaactccagcgctggataaaacaagccttagaagaagggatgactcaaacatcatctgtaccccaagagactagaactcagcacctataccaaagcaatgagaatagtagctcttctagtatctgcaaagacaatgcagacttgttgagcccattaaagaaatggaagtctcgctatctgatggagcagaatgtcaccaagttacttcggcctctgtctccagtcacaccaccccctcccaattcaggctcaaagagtccccagctggccacacctggctcatctcacccaggagaagaggagtgtcgaaatggatacagcctcatgttttcaccagtcacatctcttactactgctagtcgctgcaacactcctctacagtttgaggtgatttgggtttggttgctg

SEQ ID NO: 390 - DNA, 477 bp, Homo sapiens
  source 1..477: mol_type = genomic DNA
attcccggccaggaaacgccgtggcgccgcgttgggcctaactcgagtcctgccgcctcccgggagtgccgtgcgccgcagcccgggcccaggccccggcagcgcctgggacaaggtcttcagaactactagcagataatttggggggacttcatattcagaagtctatataaagattttacttcaatttcccaaaggcttagaagatgtactgccaaggtctctgtttggatatactgttagggaaaggaaacatacatgtgattcctcatgtccataacatgttggatgaggctctgcagctcacccccactctcagagtggtcagtctccattaattggaccccgtgatttccaatctctgctgtgttggacgtcatgagcattgcaatccctctgggagtcaccacatcagatacatcctactcagatatggctgctggatcagaggtatcctgtcttggtagtgaatggaag

SEQ ID NO: 391 - DNA, 672 bp, Homo sapiens
  source 1..672: mol_type = genomic DNA
gtactggcaacgaccctaaacatgttaccaggtcttatccattccccgttaatttgcaccacccccaaacactacattcgctttggctcaccctttatccctgagagacgtcgaaggccccttctgcctgatggcacattcagctcctgtaagaagcgctggataaaacaagccttagaagaagggatgactcaaacatcatctgtaccccaagagactagaactcagcacctataccaaagcaatgagaatagtagctcttctagtatctgcaaagacaatgcagacttgttgagcccattaaagaaatggaagtctcgctatctgatggagcagaatgtcaccaagttacttcggcctctgtctccagtcacaccaccccctcccaattcaggctcaaagagtccccagctggccacacctggctcatctcacccaggagaagaggagtgtcgaaatggatacagcctcatgttttcaccagtcacatctcttactactgctagtcgctgcaacactcctctacagtttgaggtgatttgggtttggttgctgggagtgctggatatgaaaatcatcatttgtaccttctcatttcaaatataataccattccaaatgtttctttactatctttcttccccatctcagtaagagaatgggaaacctcagg

SEQ ID NO: 392 - DNA, 427 bp, Homo sapiens
  source 1..427: mol_type = genomic DNA
aaaaattctccccatctcattcctctatgtcccatttggaggcggtaagcccatcagattccagaggcacttcttcatctcactgcagacctcaagagaatatcagcagtaggtggatggttcccacatcagtagaacgactccgagaaggagggagcatccccaaggtcctccgaagcagcgtgagggtggcccaaaagggagagccctctcccacatgggagagtaacatcacagagaaagactcaggaatacctttctgtaactctcatctctccaaagtcctggaaatctacctcgatgaaggatgaagagaaagaagacgggaatcacatcaggcatttagaacatagcccataattaaccactcattttgcccttctggcatgctgcactcacccaatttgtcacaaagagagcagtacgg

SEQ ID NO: 393 - DNA, 886 bp, Homo sapiens
  source 1..886: mol_type = genomic DNA
ggacagagttcaacttgatgtatgcctactcccctttgaatgctatgcctcgagcagatggactgtatcgaggatctcctctagtgggggataggaagcctttacatttggatgggggatattgttcccctgcagaaggattttccagcagatatgaacatggcttaatgaaagacctctctcgtggatccttgtcacctggtggtgaaagggcctgtgaaggagtcccatctgccccccagaacccaccacagaggaaaaaagtatccctgctggagtaccgaaaacggaaacaagaagctaaggaaaattctgctggtgggggaggtgactctgcacagagcaaaagcaagtctgcaggagctgggcaaggcagcagtaactccgtttccgacactggtgcccatggtgtgcagggatcctcagcccgaactccatcttcccctcacaaaaaattctccccatctcattcctctatgtcccatttggaggcggtaagcccatcagattccagaggcacttcttcatctcactgcagacctcaagagaatatcagcagtaggtggatggttcccacatcagtagaacgactccgagaaggagggagcatccccaaggtcctccgaagcagcgtgagggtggcccaaaagggagagccctctcccacatgggagagtaacatcacagagaaagactcaggtgagcccatggccttctgctgccaccacattcagggacacatgagccgagtcctgtacagttcatgcctagtgctgagttgaggtgagtcagtttctgatgcagttgggctccaccgcatgctaggttccagcccacttatgctcatttgggctaccacatttgtaagatctagcattgcttgctc

SEQ ID NO: 394 - DNA, 1320 bp, Homo sapiens
  source 1..1320: mol_type = genomic DNA
atattgctgcagaaaaactagtccccaagccacctccagcaaagccttctaggccccggccgaagagtcgaatttctcggtacaggaccagttcagcccaaagactaaagcgtcagaagcaggccaatgcacagcaggcagaattgtcacaagctgccttggaagagggaggaagtaacagtttagtaactcctactgaagctggaagtctagacagttcaggagaaaacaggccattaacagggtctgacccaactgtggtgtcaattactggatcccatgtcaaccgtgctgcatctaaataccccaaaaccaaaaagtatctagttacagaatggttgaatgacaaagcagagaagcaagagtgccctgttgagtgccctttacgtatcacaacggatccaactgtactggcaacgaccctaaacatgttaccaggtcttatccattccccgttaatttgcaccacccccaaacactacattcgctttggctcaccctttatccctgagagacgtcgaaggccccttctgcctgatggcacattcagctcctgtaagaagcgctggataaaacaagccttagaagaagggatgactcaaacatcatctgtaccccaagagactagaactcagcacctataccaaagcaatgagaatagtagctcttctagtatctgcaaagacaatgcagaggaagagagagatctcaagtcagggatcagttttcccaggacgacaaagaaggactagacagtgtacagataacagcagaaatggttataaaaaagacttgttgagcccattaaagaaatggaagtctcgctatctgatggagcagaatgtcaccaagttacttcggcctctgtctccagtcacaccaccccctcccaattcaggctcaaagagtccccagctggccacacctggctcatctcacccaggagaagaggagtgtcgaaatggatacagcctcatgttttcaccagtcacatctcttactactgctagtcgctgcaacactcctctacagtttgaggtgatttgggtttggttgctgggagtgctggatatgaaaatcatcatttgtaccttctcatttcaaatataataccattccaaatgtttctttactatctttcttccccatctcagtaagagaatgggaaacctcagggtcattgtggcctgttacctggtagcctctcatcttggcagcccctatgcttcccaaaataggcatactgctaccacaaatcccattcatgtatcttttgcatgcagtccatcaatctccataagtttaggtagtaagcatgct

SEQ ID NO: 395 - DNA, 667 bp, Homo sapiens
  source 1..667: mol_type = genomic DNA
agatccaattaagaagaatagttctgagtctaaaccagcccagagtggcttctctaggggaaactccccgctcagctgccctgaatctgtggaggctagtccagcagttaatgagaagagcgtgtattccactcataattatgggaccactcagaggcatgggtgtcgaggactgccttatgctacgatcatccctcgttctgacctgaatggcctgccgtcgcctgtagaggaacgctgtggagacagcccgaactctgaaggagaaactgtacctacctggtgtccttgtggtctttctcaggatggcttccttctcaactgtgacaagtgcagatgattccttagtgctccttggctcgaattctctgcactaggggaatgagcagggggaaggttattagacttcatcggcggaagcaggacaacatatcaggtggggatagcagtgcaacagaaagctgggatgaggagctttctccttccactgtgttgtatacagcaacacagcacacacctacaagcatcaccttaactgttagaagaaccaaacccaagaagcggaaaaagagtccagaaaagggtcgtgcagcaccaaagacgaagaaaatcaagaattctccctctgaagcacagaatttagatgagaatacaactgagggctggg

SEQ ID NO: 396 - DNA, 634 bp, Homo sapiens
  source 1..634: mol_type = genomic DNA
gtatccctgctggagtaccgaaaacggaaacaagaagctaaggaaaattctgctggtgggggaggtgactctgcacagagcaaaagcaagtctgcaggagctgggcaaggcagcagtaactccgtttccgacactggtgcccatggtgtgcagggatcctcagcccgaactccatcttcccctcacaaaaaattctccccatctcattcctctatgtcccatttggaggcggtaagcccatcagattccagaggcacttcttcatctcactgcagacctcaagagaatatcagcagtaggtggatggttcccacatcagtagaacgactccgagaaggagggagcatccccaaggtcctccgaagcagcgtgagggtggcccaaaagggagagccctctcccacatgggagagtaacatcacagagaaagactcagaccctgcagatggagaaggcccagagacattaagctcagcactctctaaaggagcaacagtttacagcccttccagatacagctaccaggtgagatgagaaattgctggtctctagccataggagtgtgttctgggtcccaaattgtcctggtcatcctttgccattgagatgctgtctttgcatatagtttcagcag

SEQ ID NO: 397 - DNA, 4861 bp, Homo sapiens
  source 1..4861: mol_type = genomic DNA
gagtgtaatccattcttatacattgtgactttcttgaaatgtttatatgcagcatgacgaagttgccccttttgcacttccctgactccagcggacgtctagccctgcatcattgttcttgtttttatgtcccagttgaccttggcattttgttttatcactttcctggttgaagccaaaaaacaaagggtactactttcttctttctttccatatgtaccatactttaggggagagaggggccagtgtttggacactgttgatttaaaaaatcttattttcaggatcataattacggagcccctcctcctccgacacctcctgcttctccccctgtccagacgatcatccctcgttctgacctgaatggcctgccgtcgcctgtagaggaacgctgtggagacagcccgaactctgaaggagaaactgtacctacctggtgtccttgtggtctttctcaggatggcttccttctcaactgtgacaagtgcaggggaatgagcagggggaaggttattagacttcatcggcggaagcaggacaacatatcaggtggggatagcagtgcaacagaaagctgggatgaggagctttctccttccactgtgttgtatacagcaacacagcacacacctacaagcatcaccttaactgttagaagaaccaaacccaagaagcggaaaaagagtccagaaaagggtcgtgcagcaccaaagacgaagaaaatcaagaattctccctctgaagcacagaatttagatgagaatacaactgagggctgggaaaatcggataagactatggactgaccagtatgaagaagctttcactaatcagtacagtgcagatgtacagaacgcgcttgaacaacacctacattctagcaaggaatttgtgggcaaacctactattttagacactattaataagactgaattggcctgtaataacacagttattggttcccaaatgcagttacagctgggaagagtcactcgtgttcaaaagcaccggaagatcctgagggctgcaagagatttggctttggacactcttataatagagtatcgtgggaaagtcatgttacgacagcaatttgaggtcaatgggcatttcttcaaaaaaccatacccctttgtgctcttctactcaaaattcaatggtgtagagatgtgtgtggatgcccgtactttcggtaatgatgctcggttcatcagaagatcatgtacaccaaatgcagaggtgcgacacatgattgcagatgggatgattcacctgtgcatctatgctgtgtctgccatcaccaaggatgctgaggtcaccatagcatttgattatgagtatagtaactgtaattataaagtggactgtgcctgtcacaagggaaaccggaattgtcctatacaaaaaaggaatcctaatgctacagaactgccactcctaccacctcctccaagcctacccaccattggagcagagactagacgtagaaaagcacgacggaaagagctagagatggagcagcagaatgaggcttcagaggagaataatgaccagcaatcacaagaagttccagaaaaagtaactgtatccagtgatcatgaggaagtagacaatccagaagaaaaaccagaagaagagaaagaagaggttatagatgaccaggagaacctagctcatagcaggaggaccagggaagatagaaaggtagaagccatcatgcatgcttttgaaaacttagagaaaagaaagaagcggcgggatcagcccttggaacagagcaactctgatgtagagattactacaaccacctcagagactcctgttggtgaagagacaaaaactgaagcccctgaatctgaagttagcaactctgtttcaaatgttaccatcccaagcaccccacagagtgttggtgtgaatacccggaggtcttcccaagcaggggatattgctgcagaaaaactagtccccaagccacctccagcaaagccttctaggccccggccgaagagtcgaatttctcggtacaggaccagttcagcccaaagactaaagcgtcagaagcaggccaatgcacagcaggcagaattgtcacaagctgccttggaagagggaggaagtaacagtttagtaactcctactgaagctggaagtctagacagttcaggagaaaacaggccattaacagggtctgacccaactgtggtgtcaattactggatcccatgtcaaccgtgctgcatctaaataccccaaaaccaaaaagtatctagttacagaatggttgaatgacaaagcagagaagcaagagtgccctgttgagtgccctttacgtatcacaacggatccaactgtactggcaacgaccctaaacatgttaccaggtcttatccattccccgttaatttgcaccacccccaaacactacattcgctttggctcaccctttatccctgagagacgtcgaaggccccttctgcctgatggcacattcagctcctgtaagaagcgctggataaaacaagccttagaagaagggatgactcaaacatcatctgtaccccaagagactagaactcagcacctataccaaagcaatgagaatagtagctcttctagtatctgcaaagacaatgcagacttgttgagcccattaaagaaatggaagtctcgctatctgatggagcagaatgtcaccaagttacttcggcctctgtctccagtcacaccaccccctcccaattcaggctcaaagagtccccagctggccacacctggctcatctcacccaggagaagaggagtgtcgaaatggatacagcctcatgttttcaccagtcacatctcttactactgctagtcgctgcaacactcctctacagtttgagctttgtcaccgaaaagacctggatttggcaaaagtaggataccttgactccaacactaacagctgtgctgatagaccttccctactcaactcaggtcattctgacctggctcctcatccctccctcggacccacttctgagactggtttcccaagcagaagtggagatggacatcagaccctcgtgagaaactcagaccaggcatttcggacagagttcaacttgatgtatgcctactcccctttgaatgctatgcctcgagcagatggactgtatcgaggatctcctctagtgggggataggaagcctttacatttggatgggggatattgttcccctgcagaaggattttccagcagatatgaacatggcttaatgaaagacctctctcgtggatccttgtcacctggtggtgaaagggcctgtgaaggagtcccatctgccccccagaacccaccacagaggaaaaaagtatccctgctggagtaccgaaaacggaaacaagaagctaaggaaaattctgctggtgggggaggtgactctgcacagagcaaaagcaagtctgcaggagctgggcaaggcagcagtaactccgtttccgacactggtgcccatggtgtgcagggatcctcagcccgaactccatcttcccctcacaaaaaattctccccatctcattcctctatgtcccatttggaggcggtaagcccatcagattccagaggcacttcttcatctcactgcagacctcaagagaatatcagcagtaggtggatggttcccacatcagtagaacgactccgagaaggagggagcatccccaaggtcctccgaagcagcgtgagggtggcccaaaagggagagccctctcccacatgggagagtaacatcacagagaaagactcagaccctgcagatggagaaggcccagagacattaagctcagcactctctaaaggagcaacagtttacagcccttccagatacagctaccagctcctgcagtgtgatagtcctcggacagaatcacaaagcctccttcagcagagttcctcccccttcagaggacatcctacacagtctccaggatacagttatcgaactactgcactgagacctggaaaccccccctctcacggttcttcagaatcatccctctcttccacgtcctattccagccccgcccaccctgtgtccacagactcgttggccccatttacggggacaccagggtattttagcagccagccacattctggaaacagcactggcagcaatcttccaaggaggagctgcccttctagtgctgctagccctaccctgcagggaccctcagactcgccaacctcagattcagtttctcagtccagcacaggaactctgagttccacctcctttcctcagaactctaggtcgtcattgccatcagacttacggactatcagtctgcccagtgctgggcagtcagctgtctaccaggcctccagggtatctgcggtttccaattcacagcactacccacaccgtgggagtgggggtgtgcaccagtaccgactccagccactgcaagggtcaggagtcaagactcagacgggactttcctagggcttctggatttgggcaaacagaactgaatgagcccatagctgcttccttccagctgcctctggaacctaggccgagcatattgctgaggaacggggggtacaaggtgccagaggattgggtctggtggacaagaaacaagacttgtggtcacaattggcctctggccttggagaaagctgtaaatcttgtctgaagcagagactataaagaagtttctccctgctgtcaagggtacattgttgacaagcaaatggtgtttcggttagtaacggttctaagtgcaatgagttgtgttgaagcctccgtctcccatccttgcctgtagcccgtagtcacttgtgcagtgaggacatctttttaaattt

SEQ ID NO: 398 - DNA, 552 bp, Homo sapiens
  source 1..552: mol_type = genomic DNA
agagatgtgtgtggatgcccgtactttcggtaatgatgctcggttcatcagaagatcatgtacaccaaatgcagaggtgcgacacatgattgcagatgggatgattcacctgtgcatctatgctgtgtctgccatcaccaaggatgctgaggtcaccatagcatttgattatgagtatagtaactgtaattataaagtggactgtgcctgtcacaagggaaaccggaattgtcctatacaaaaaaggaatcctaatgctacagaactgccactcctaccacctcctccaagcctacccaccattggagcagagactagacgtagaaaagcacgacggaaagagctagagatggagcagcagaatgaggcttcagaggagaataatgaccagcaatcacaagaagttccagaaaaagtaactgtatccagtgatcatgagagcttgagtacagctgaatattgcctctatcttaaaggaagtagacaatccagaagaaaaaccagaagaagagaaagaagaggttatagatgaccaggagaacctagctcata

SEQ ID NO: 399 - DNA, 5823 bp, Homo sapiens
  source 1..5823: mol_type = genomic DNA
gcgttgggcctaactcgagtcctgccgcctcccgggagtgccgtgcgccgcagcccgggcccaggccccggcagcgcctgggacaaggtcttcagaactactagcagataatttggggggacttcatattcagaagtctatataaaggattcctcatgtccataacatgttggatgaggctctgcagctcacccccactctcagagtggtcagtctccattaattggaccccgtgatttccaatctctgctgtgttggacgtcatgagcattgcaatccctctgggagtcaccacatcagatacatcctactcagatatggctgctggatcagaaaaggaagtggaagccccctacctttcaagacgaagtggcactacaccaggatgtgaaagtccagcgaaagagacccaaggggcctagggggcagcacacccccagaagccaagtctattccaggcagtaccagggattagggtctgggctggaaaaatcctggtgttttgaatatgttcaggtccagttcagactcttgatcccacagccacttcttgagtgagccctgaatctgtggaggctagtccagcagttaatgagaagagcgtgtattccactcataattatgggaccactcagaggcatgggtgtcgaggactgccttatgctacgatcatccctcgttctgacctgaatggcctgccgtcgcctgtagaggaacgctgtggagacagcccgaactctgaaggagaaactgtacctacctggtgtccttgtggtctttctcaggatggcttccttctcaactgtgacaagtgcagatgattccttagtgctccttggctcgaattctctgcactaggggaatgagcagggggaaggttattagacttcatcggcggaagcaggacaacatatcaggtggggatagcagtgcaacagaaagctgggatgaggagctttctccttccactgtgttgtatacagcaacacagcacacacctacaagcatcaccttaactgttagaagaaccaaacccaagaagcggaaaaagagtccagaaaagggtcgtgcagcaccaaagacgaagaaaatcaaggcatttcgagagggatcccggaagtccttgcggatgaagaattctccctctgaagcacagaatttagatgagaatacaactgagggctgggaaaatcggataagactatggactgaccagtatgaagaagctttcactaatcagtacagtgcagatgtacagaacgcgcttgaacaacacctacattctagcaaggaatttgtgggcaaacctactattttagacactattaataagactgaattggcctgtaataacacagttattggttcccaaatgcagttacagctgggaagagtcactcgtgttcaaaagcaccggaagatcctgagggctgcaagagatttggctttggacactcttataatagagtatcgtgggaaagtcatgttacgacagcaatttgaggtcaatgggcatttcttcaaaaaaccatacccctttgtgctcttctactcaaaattcaatggtgtagagatgtgtgtggatgcccgtactttcggtaatgatgctcggttcatcagaagatcatgtacaccaaatgcagaggtgcgacacatgattgcagatgggatgattcacctgtgcatctatgctgtgtctgccatcaccaaggatgctgaggtcaccatagcatttgattatgagtatagtaactgtaattataaagtggactgtgcctgtcacaagggaaaccggaattgtcctatacaaaaaaggaatcctaatgctacagaactgccactcctaccacctcctccaagcctacccaccattggagcagagactagacgtagaaaagcacgacggaaagagctagagatggagcagcagaatgaggcttcagaggagaataatgaccagcaatcacaagaagttccagaaaaagtaactgtatccagtgatcatgaggaagtagacaatccagaagaaaaaccagaagaagagaaagaagaggttatagatgaccaggagaacctagctcatagcaggaggaccagggaagatagaaaggtagaagccatcatgcatgcttttgaaaacttagagaaaagaaagaagcggcgggatcagcccttggaacagagcaactctgatgtagagattactacaaccacctcagagactcctgttggtgaagagacaaaaactgaagcccctgaatctgaagttagcaactctgtttcaaatgttaccatcccaagcaccccacagagtgttggtgtgaatacccggaggtcttcccaagcaggggatattgctgcagaaaaactagtccccaagccacctccagcaaagccttctaggccccggccgaagagtcgaatttctcggtacaggaccagttcagcccaaagactaaagcgtcagaagcaggccaatgcacagcaggcagaattgtcacaagctgccttggaagagggaggaagtaacagtttagtaactcctactgaagctggaagtctagacagttcaggagaaaacaggccattaacagggtctgacccaactgtggtgtcaattactggatcccatgtcaaccgtgctgcatctaaataccccaaaaccaaaaagtatctagttacagaatggttgaatgacaaagcagagaagcaagagtgccctgttgagtgccctttacgtatcacaacggatccaactgtactggcaacgaccctaaacatgttaccaggtcttatccattccccgttaatttgcaccacccccaaacactacattcgctttggctcaccctttatccctgagagacgtcgaaggccccttctgcctgatggcacattcagctcctgtaagaagcgctggataaaacaagccttagaagaagggatgactcaaacatcatctgtaccccaagagactagaactcagcacctataccaaagcaatgagaatagtagctcttctagtatctgcaaagacaatgcagacttgttgagcccattaaagaaatggaagtctcgctatctgatggagcagaatgtcaccaagttacttcggcctctgtctccagtcacaccaccccctcccaattcaggctcaaagagtccccagctggccacacctggctcatctcacccaggagaagaggagtgtcgaaatggatacagcctcatgttttcaccagtcacatctcttactactgctagtcgctgcaacactcctctacagtttgagctttgtcaccgaaaagacctggatttggcaaaagtaggataccttgactccaacactaacagctgtgctgatagaccttccctactcaactcaggtcattctgacctggctcctcatccctccctcggacccacttctgagactggtttcccaagcagaagtggagatggacatcagaccctcgtgagaaactcagaccaggcatttcggacagagttcaacttgatgtatgcctactcccctttgaatgctatgcctcgagcagatggactgtatcgaggatctcctctagtgggggataggaagcctttacatttggatgggggatattgttcccctgcagaaggattttccagcagatatgaacatggcttaatgaaagacctctctcgtggatccttgtcacctggtggtgaaagggcctgtgaaggagtcccatctgccccccagaacccaccacagaggaaaaaagtatccctgctggagtaccgaaaacggaaacaagaagctaaggaaaattctgctggtgggggaggtgactctgcacagagcaaaagcaagtctgcaggagctgggcaaggcagcagtaactccgtttccgacactggtgcccatggtgtgcagggatcctcagcccgaactccatcttcccctcacaaaaaattctccccatctcattcctctatgtcccatttggaggcggtaagcccatcagattccagaggcacttcttcatctcactgcagacctcaagagaatatcagcagtaggtggatggttcccacatcagtagaacgactccgagaaggagggagcatccccaaggtcctccgaagcagcgtgagggtggcccaaaagggagagccctctcccacatgggagagtaacatcacagagaaagactcagaccctgcagatggagaaggcccagagacattaagctcagcactctctaaaggagcaacagtttacagcccttccagatacagctaccagctcctgcagtgtgatagtcctcggacagaatcacaaagcctccttcagcagagttcctcccccttcagaggacatcctacacagtctccaggatacagttatcgaactactgcactgagacctggaaaccccccctctcacggttcttcagaatcatccctctcttccacgtcctattccagccccgcccaccctgtgtccacagactcgttggccccatttacggggacaccagggtattttagcagccagccacattctggaaacagcactggcagcaatcttccaaggaggagctgcccttctagtgctgctagccctaccctgcagggaccctcagactcgccaacctcagattcagtttctcagtccagcacaggaactctgagttccacctcctttcctcagaactctaggtcgtcattgccatcagacttacggactatcagtctgcccagtgctgggcagtcagctgtctaccaggcctccagggtatctgcggtttccaattcacagcactacccacaccgtgggagtgggggtgtgcaccagtaccgactccagccactgcaagggtcaggagtcaagactcagacgggactttcctagggcttctggatttgggcaaacagaactgaatgagcccatagctgcttccttccagctgcctctggaacctaggccgagcatattgctgaggaacggggggtacaaggtgccagaggattgggtctggtggacaagaaacaagacttgtggtcacaattggcctctggccttggagaaagctgtaaatcttgtctgaagcagagactataaagaagtttctccctgctgtcaagggtacattgttgacaagcaaatggtgtttcggttagtaacggttctaagtgcaatgagttgtgttgaagcctccgtctcccatccttgcctgtagcccgtagtcacttgtgcagtgaggacatctttttaaatttaaaaaaaaaaaaaaaaaaagttttcaaaggaaaaaaagttaaaagagccaatctcaaagccccaagccatctgagtactgttagggttttatgcacttaagaaaaaaggtaggtatgtaaatgttcatcctaagacaaccattccaaaagcaggtatctggccaatgtgtgtccaccaagaatactgtttatctttgtcttaagatcaccaagaaataggcaaggatagtaaagcttggaacctgcaccaactggagggtgcctggctctttgaagaaaagctcatggtcagctcttgattattcgggagcagattatttgagtagattgtctgagcctccaactgttaccatcctactcccccttcccaagctatttcacagctcagtaacccatgaagtaagtagacaagaaaaggaggaatgagacatgatataggccaattgcattgctacttaccagcttttggcaataaatttcattaggaaggataccgagtggtttgggaatgcttcgaattttattttttctactcccaattaatcaggagttgatgat

SEQ ID NO: 400 - DNA, 437 bp, Homo sapiens
  source 1..437: mol_type = genomic DNA
tatctagttacagaatggttgaatgacaaagcagagaagcaagagtgccctgttgagtgccctttacgtatcacaacggatccaactgtactggcaacgaccctaaacatgttaccaggtcttatccattccccgttaatttgcaccacccccaaacactacattcgctttggctcaccctttatccctgagagacgtcgaaggccccttctgcctgatggcacattcagctcctgtaagaagggcaggagagccacagagtggtgagcaacctacaactgtatatcttaagagaacacaattacagcgctggataaaacaagccttagaagaagggatgactcaaacatcatctgtaccccaagagactagaactcagcacctataccaaagcaatgagaatagtagctcttctagtatctgcaaagacaatgcag

SEQ ID NO: 401 - DNA, 6276 bp, Homo sapiens
  source 1..6276: mol_type = genomic DNA
gggcctaactcgagtcctgccgcctcccgggagtgccgtgcgccgcagcccgggcccaggccccggcagcgcctgggacaagacactgaaattgaggaagagagattttggcgttctgttggtttatggagagagttgatcagagattgctccttggctgagttgctgtctgcataggctgttaacaattgtttctctggcagcagatcttgttcatcaggattgcatcatttctgggagaatggccaaggtccacagcctcaatacaaagactgtctgaagcatatgaggcctgttctctttctgaagcggcactcctcttcctgccagtcctcttcacaggattactgaagcagacttgttctgaatttctttcgttggattggttgtttattggacttttgtctgccagctgcttccgcctcacctgtctgatgcaatttcttcttctgaaatctgttggaattgttcataaaacactttttgtttgtcttctctgtgagtgaccagggagatcatacaggtcttgtgctttcagcaagtcatatagagaagagactgtcagaatgatgatacagagactgttggccatttctgaaaccaattaaaaagatggggtcttcagaactactagcagataatttggggggacttcatattcagaagtctatataaaggattcctcatgtccataacatgttggatgaggctctgcagctcacccccactctcagagtggtcagtctccattaattggaccccgtgatttccaatctctgctgtgttggacgtcatgagcattgcaatccctctgggagtcaccacatcagatacatcctactcagatatggctgctggatcagaaaaggaagtggaagccccctacctttcaagacgaagtggcactacaccaggatgtgaaagtccagcgaaagagacccaaggggcctagggggcagcacacccccagaagccaagtctattccaggcagtaccagggattagggtctgggctggaaaaatcctggtgttttgaatatgttcaggtccagttcagactcttgatcccacagccacttcttgagtgagccctgaatctgtggaggctagtccagcagttaatgagaagagcgtgtattccactcataattatgggaccactcagaggcatgggtgtcgaggactgccttatgctacgatcatccctcgttctgacctgaatggcctgccgtcgcctgtagaggaacgctgtggagacagcccgaactctgaaggagaaactgtacctacctggtgtccttgtggtctttctcaggatggcttccttctcaactgtgacaagtgcaggggaatgagcagggggaaggttattagacttcatcggcggaagcaggacaacatatcaggtggggatagcagtgcaacagaaagctgggatgaggagctttctccttccactgtgttgtatacagcaacacagcacacacctacaagcatcaccttaactgttagaagaaccaaacccaagaagcggaaaaagagtccagaaaagggtcgtgcagcaccaaagacgaagaaaatcaagaattctccctctgaagcacagaatttagatgagaatacaactgagggctgggaaaatcggataagactatggactgaccagtatgaagaagctttcactaatcagtacagtgcagatgtacagaacgcgcttgaacaacacctacattctagcaaggaatttgtgggcaaacctactattttagacactattaataagactgaattggcctgtaataacacagttattggttcccaaatgcagttacagctgggaagagtcactcgtgttcaaaagcaccggaagatcctgagggctgcaagagatttggctttggacactcttataatagagtatcgtgggaaagtcatgttacgacagcaatttgaggtcaatgggcatttcttcaaaaaaccatacccctttgtgctcttctactcaaaattcaatggtgtagagatgtgtgtggatgcccgtactttcggtaatgatgctcggttcatcagaagatcatgtacaccaaatgcagaggtgcgacacatgattgcagatgggatgattcacctgtgcatctatgctgtgtctgccatcaccaaggatgctgaggtcaccatagcatttgattatgagtatagtaactgcagtaattataaagtggactgtgcctgtcacaagggaaaccggaattgtcctatacaaaaaaggaatcctaatgctacagaactgccactcctaccacctcctccaagcctacccaccattggagcagagactagacgtagaaaagcacgacggaaagagctagagatggagcagcagaatgaggcttcagaggagaataatgaccagcaatcacaagaagttccagaaaaagtaactgtatccagtgatcatgaggaagtagacaatccagaagaaaaaccagaagaagagaaagaagaggttatagatgaccaggagaacctagctcatagcaggaggaccagggaagatagaaaggtagaagccatcatgcatgcttttgaaaacttagagaaaagaaagaagcggcgggatcagcccttggaacagagcaactctgatgtagagattactacaaccacctcagagactcctgttggtgaagagacaaaaactgaagcccctgaatctgaagttagcaactctgtttcaaatgttaccatcccaagcaccccacagagtgttggtgtgaatacccggaggtcttcccaagcaggggatattgctgcagaaaaactagtccccaagccacctccagcaaagccttctaggccccggccgaagagtcgaatttctcggtacaggaccagttcagcccaaagactaaagcgtcagaagcaggccaatgcacagcaggcagaattgtcacaagctgccttggaagagggaggaagtaacagtttagtaactcctactgaagctggaagtctagacagttcaggagaaaacaggccattaacagggtctgacccaactgtggtgtcaattactggatcccatgtcaaccgtgctgcatctaaataccccaaaaccaaaaagtatctagttacagaatggttgaatgacaaagcagagaagcaagagtgccctgttgagtgccctttacgtatcacaacggatccaactgtactggcaacgaccctaaacatgttaccaggtcttatccattccccgttaatttgcaccacccccaaacactacattcgctttggctcaccctttatccctgagagacgtcgaaggccccttctgcctgatggcacattcagctcctgtaagaagcgctggataaaacaagccttagaagaagggatgactcaaacatcatctgtaccccaagagactagaactcagcacctataccaaagcaatgagaatagtagctcttctagtatctgcaaagacaatgcagacttgttgagcccattaaagaaatggaagtctcgctatctgatggagcagaatgtcaccaagttacttcggcctctgtctccagtcacaccaccccctcccaattcaggctcaaagagtccccagctggccacacctggctcatctcacccaggagaagaggagtgtcgaaatggatacagcctcatgttttcaccagtcacatctcttactactgctagtcgctgcaacactcctctacagtttgagctttgtcaccgaaaagacctggatttggcaaaagtaggataccttgactccaacactaacagctgtgctgatagaccttccctactcaactcaggtcattctgacctggctcctcatccctccctcggacccacttctgagactggtttcccaagcagaagtggagatggacatcagaccctcgtgagaaactcagaccaggcatttcggacagagttcaacttgatgtatgcctactcccctttgaatgctatgcctcgagcagatggactgtatcgaggatctcctctagtgggggataggaagcctttacatttggatgggggatattgttcccctgcagaaggattttccagcagatatgaacatggcttaatgaaagacctctctcgtggatccttgtcacctggtggtgaaagggcctgtgaaggagtcccatctgccccccagaacccaccacagaggaaaaaagtatccctgctggagtaccgaaaacggaaacaagaagctaaggaaaattctgctggtgggggaggtgactctgcacagagcaaaagcaagtctgcaggagctgggcaaggcagcagtaactccgtttccgacactggtgcccatggtgtgcagggatcctcagcccgaactccatcttcccctcacaaaaaattctccccatctcattcctctatgtcccatttggaggcggtaagcccatcagattccagaggcacttcttcatctcactgcagacctcaagagaatatcagcagtaggtggatggttcccacatcagtagaacgactccgagaaggagggagcatccccaaggtcctccgaagcagcgtgagggtggcccaaaagggagagccctctcccacatgggagagtaacatcacagagaaagactcagaccctgcagatggagaaggcccagagacattaagctcagcactctctaaaggagcaacagtttacagcccttccagatacagctaccagctcctgcagtgtgatagtcctcggacagaatcacaaagcctccttcagcagagttcctcccccttcagaggacatcctacacagtctccaggatacagttatcgaactactgcactgagacctggaaaccccccctctcacggttcttcagaatcatccctctcttccacgtcctattccagccccgcccaccctgtgtccacagactcgttggccccatttacggggacaccagggtattttagcagccagccacattctggaaacagcactggcagcaatcttccaaggaggagctgcccttctagtgctgctagccctaccctgcagggaccctcagactcgccaacctcagattcagtttctcagtccagcacaggaactctgagttccacctcctttcctcagaactctaggtcgtcattgccatcagacttacggactatcagtctgcccagtgctgggcagtcagctgtctaccaggcctccagggtatctgcggtttccaattcacagcactacccacaccgtgggagtgggggtgtgcaccagtaccgactccagccactgcaagggtcaggagtcaagactcagacgggactttcctagggcttctggatttgggcaaacagaactgaatgagcccatagctgcttccttccagctgcctctggaacctaggccgagcatattgctgaggaacggggggtacaaggtgccagaggattgggtctggtggacaagaaacaagacttgtggtcacaattggcctctggccttggagaaagctgtaaatcttgtctgaagcagagactataaagaagtttctccctgctgtcaagggtacattgttgacaagcaaatggtgtttcggttagtaacggttctaagtgcaatgagttgtgttgaagcctccgtctcccatccttgcctgtagcccgtagtcacttgtgcagtgaggacatctttttaaatttaaaaaaaaaaaaaaaaaaagttttcaaaggaaaaaaagttaaaagagccaatctcaaagccccaagccatctgagtactgttagggttttatgcacttaagaaaaaaggtaggtatgtaaatgttcatcctaagacaaccattccaaaagcaggtatctggccaatgtgtgtccaccaagaatactgtttatctttgtcttaagatcaccaagaaataggcaaggatagtaaagcttggaacctgcaccaactggagggtgcctggctctttgaagaaaagctcatggtcagctcttgattattcgggagcagattatttgagtagattgtctgagcctccaactgttaccatcctactcccccttcccaagctatttcacagctcagtaacccatgaagtaagtagacaagaaaaggaggaatgagacatgatataggccaattgcattgctacttaccagcttttggcaataaatttcattaggaaggataccgagtggtttgggaatgcttcgaattttattttttctactcccaattaatcaggagttgatgat

SEQ ID NO: 402 - DNA, 6581 bp, Homo sapiens
  source 1..6581: mol_type = genomic DNA
gggcctaactcgagtcctgccgcctcccgggagtgccgtgcgccgcagcccgggcccaggccccggcagcgcctgggacaagacactgaaattgaggaagagagattttggcgttctgttggtttatggagagagttgatcagagattgctccttggctgagttgctgtctgcataggctgttaacaattgtttctctggcagcagatcttgttcatcaggattgcatcatttctgggagaatggccaaggtccacagcctcaatacaaagactgtctgaagcatatgaggcctgttctctttctgaagcggcactcctcttcctgccagtcctcttcacaggattactgaagcagacttgttctgaatttctttcgttggattggttgtttattggacttttgtctgccagctgcttccgcctcacctgtctgatgcaatttcttcttctgaaatctgttggaattgttcataaaacactttttgtttgtcttctctgtgagtgaccagggagatcatacaggtcttgtgctttcagcaagtcatatagagaagagactgtcagaatgatgatacagagactgttggccatttctgaaaccaattaaaaagatggggtcttcagaactactagcagataatttggggggacttcatattcagaagtctatataaaggattcctcatgtccataacatgttggatgaggctctgcagctcacccccactctcagagtggtcagtctccattaattggaccccgtgatttccaatctctgctgtgttggacgtcatgagcattgcaatccctctgggagtcaccacatcagatacatcctactcagatatggctgctggatcagaaaaggaagtggaagccccctacctttcaagacgaagtggcactacaccaggatgtgaaagtccagcgaaagagacccaaggggcctagggggcagcacacccccagaagccaagtctattccaggcagtaccagggattagggtctgggctggaaaaatcctggtgttttgaatatgttcaggtccagttcagactcttgatcccacagccacttcttgagtgagggtatcctgtcttggtagtgaatggaagagggcctggtccctggggcagtgcagaaggcactttgatcatctcactcactgcaaatgtcatgtgaggtttcatggaagtattaagagatccaattaagaagaatagttctgagtctaaaccagcccagagtggcttctctaggggaaactccccgctcagctgccctgaatctgtggaggctagtccagcagttaatgagaagagcgtgtattccactcataattatgggaccactcagaggcatgggtgtcgaggactgccttatgctacgatcatccctcgttctgacctgaatggcctgccgtcgcctgtagaggaacgctgtggagacagcccgaactctgaaggagaaactgtacctacctggtgtccttgtggtctttctcaggatggcttccttctcaactgtgacaagtgcaggggaatgagcagggggaaggttattagacttcatcggcggaagcaggacaacatatcaggtggggatagcagtgcaacagaaagctgggatgaggagctttctccttccactgtgttgtatacagcaacacagcacacacctacaagcatcaccttaactgttagaagaaccaaacccaagaagcggaaaaagagtccagaaaagggtcgtgcagcaccaaagacgaagaaaatcaagaccaacctctcttctgccacaccatatcatcaccactggctcaaagtttcttctactccagtccccatcccaggcatttcgagagggatcccggaagtccttgcggatgaagaattctccctctgaagcacagaatttagatgagaatacaactgagggctgggaaaatcggataagactatggactgaccagtatgaagaagctttcactaatcagtacagtgcagatgtacagaacgcgcttgaacaacacctacattctagcaaggaatttgtgggcaaacctactattttagacactattaataagactgaattggcctgtaataacacagttattggttcccaaatgcagttacagctgggaagagtcactcgtgttcaaaagcaccggaagatcctgagggctgcaagagatttggctttggacactcttataatagagtatcgtgggaaagtcatgttacgacagcaatttgaggtcaatgggcatttcttcaaaaaaccatacccctttgtgctcttctactcaaaattcaatggtgtagagatgtgtgtggatgcccgtactttcggtaatgatgctcggttcatcagaagatcatgtacaccaaatgcagaggtgcgacacatgattgcagatgggatgattcacctgtgcatctatgctgtgtctgccatcaccaaggatgctgaggtcaccatagcatttgattatgagtatagtaactgcagtaattataaagtggactgtgcctgtcacaagggaaaccggaattgtcctatacaaaaaaggaatcctaatgctacagaactgccactcctaccacctcctccaagcctacccaccattggagcagagactagacgtagaaaagcacgacggaaagagctagagatggagcagcagaatgaggcttcagaggagaataatgaccagcaatcacaagaagttccagaaaaagtaactgtatccagtgatcatgaggaagtagacaatccagaagaaaaaccagaagaagagaaagaagaggttatagatgaccaggagaacctagctcatagcaggaggaccagggaagatagaaaggtagaagccatcatgcatgcttttgaaaacttagagaaaagaaagaagcggcgggatcagcccttggaacagagcaactctgatgtagagattactacaaccacctcagagactcctgttggtgaagagacaaaaactgaagcccctgaatctgaagttagcaactctgtttcaaatgttaccatcccaagcaccccacagagtgttggtgtgaatacccggaggtcttcccaagcaggggatattgctgcagaaaaactagtccccaagccacctccagcaaagccttctaggccccggccgaagagtcgaatttctcggtacaggaccagttcagcccaaagactaaagcgtcagaagcaggccaatgcacagcaggcagaattgtcacaagctgccttggaagagggaggaagtaacagtttagtaactcctactgaagctggaagtctagacagttcaggagaaaacaggccattaacagggtctgacccaactgtggtgtcaattactggatcccatgtcaaccgtgctgcatctaaataccccaaaaccaaaaagtatctagttacagaatggttgaatgacaaagcagagaagcaagagtgccctgttgagtgccctttacgtatcacaacggatccaactgtactggcaacgaccctaaacatgttaccaggtcttatccattccccgttaatttgcaccacccccaaacactacattcgctttggctcaccctttatccctgagagacgtcgaaggccccttctgcctgatggcacattcagctcctgtaagaagcgctggataaaacaagccttagaagaagggatgactcaaacatcatctgtaccccaagagactagaactcagcacctataccaaagcaatgagaatagtagctcttctagtatctgcaaagacaatgcagacttgttgagcccattaaagaaatggaagtctcgctatctgatggagcagaatgtcaccaagttacttcggcctctgtctccagtcacaccaccccctcccaattcaggctcaaagagtccccagctggccacacctggctcatctcacccaggagaagaggagtgtcgaaatggatacagcctcatgttttcaccagtcacatctcttactactgctagtcgctgcaacactcctctacagtttgagctttgtcaccgaaaagacctggatttggcaaaagtaggataccttgactccaacactaacagctgtgctgatagaccttccctactcaactcaggtcattctgacctggctcctcatccctccctcggacccacttctgagactggtttcccaagcagaagtggagatggacatcagaccctcgtgagaaactcagaccaggcatttcggacagagttcaacttgatgtatgcctactcccctttgaatgctatgcctcgagcagatggactgtatcgaggatctcctctagtgggggataggaagcctttacatttggatgggggatattgttcccctgcagaaggattttccagcagatatgaacatggcttaatgaaagacctctctcgtggatccttgtcacctggtggtgaaagggcctgtgaaggagtcccatctgccccccagaacccaccacagaggaaaaaagtatccctgctggagtaccgaaaacggaaacaagaagctaaggaaaattctgctggtgggggaggtgactctgcacagagcaaaagcaagtctgcaggagctgggcaaggcagcagtaactccgtttccgacactggtgcccatggtgtgcagggatcctcagcccgaactccatcttcccctcacaaaaaattctccccatctcattcctctatgtcccatttggaggcggtaagcccatcagattccagaggcacttcttcatctcactgcagacctcaagagaatatcagcagtaggtggatggttcccacatcagtagaacgactccgagaaggagggagcatccccaaggtcctccgaagcagcgtgagggtggcccaaaagggagagccctctcccacatgggagagtaacatcacagagaaagactcagaccctgcagatggagaaggcccagagacattaagctcagcactctctaaaggagcaacagtttacagcccttccagatacagctaccagctcctgcagtgtgatagtcctcggacagaatcacaaagcctccttcagcagagttcctcccccttcagaggacatcctacacagtctccaggatacagttatcgaactactgcactgagacctggaaaccccccctctcacggttcttcagaatcatccctctcttccacgtcctattccagccccgcccaccctgtgtccacagactcgttggccccatttacggggacaccagggtattttagcagccagccacattctggaaacagcactggcagcaatcttccaaggaggagctgcccttctagtgctgctagccctaccctgcagggaccctcagactcgccaacctcagattcagtttctcagtccagcacaggaactctgagttccacctcctttcctcagaactctaggtcgtcattgccatcagacttacggactatcagtctgcccagtgctgggcagtcagctgtctaccaggcctccagggtatctgcggtttccaattcacagcactacccacaccgtgggagtgggggtgtgcaccagtaccgactccagccactgcaagggtcaggagtcaagactcagacgggactttcctagggcttctggatttgggcaaacagaactgaatgagcccatagctgcttccttccagctgcctctggaacctaggccgagcatattgctgaggaacggggggtacaaggtgccagaggattgggtctggtggacaagaaacaagacttgtggtcacaattggcctctggccttggagaaagctgtaaatcttgtctgaagcagagactataaagaagtttctccctgctgtcaagggtacattgttgacaagcaaatggtgtttcggttagtaacggttctaagtgcaatgagttgtgttgaagcctccgtctcccatccttgcctgtagcccgtagtcacttgtgcagtgaggacatctttttaaatttaaaaaaaaaaaaaaaaaaagttttcaaaggaaaaaaagttaaaagagccaatctcaaagccccaagccatctgagtactgttagggttttatgcacttaagaaaaaaggtaggtatgtaaatgttcatcctaagacaaccattccaaaagcaggtatctggccaatgtgtgtccaccaagaatactgtttatctttgtcttaagatcaccaagaaataggcaaggatagtaaagcttggaacctgcaccaactggagggtgcctggctctttgaagaaaagctcatggtcagctcttgattattcgggagcagattatttgagtagattgtctgagcctccaactgttaccatcctactcccccttcccaagctatttcacagctcagtaacccatgaagtaagtagacaagaaaaggaggaatgagacatgatataggccaattgcattgctacttaccagcttttggcaataaatttcattaggaaggataccgagtggtttgggaatgcttcgaattttattttttctactcccaattaatcaggagttgatgat

SEQ ID NO: 403 - DNA, 5840 bp, Homo sapiens
  source 1..5840: mol_type = genomic DNA
tcccacctcagcctcttaaatagcttggactacaggtaaaaggctgtttgtcatggtacagctacggtgattttacttgagatatttgactttgagatggagatgaagataagtatataatgcagctgccacattcattctcatacaagacactgaaattgaggaagagagattttggcgttctgttggtttatggagagagttgatcagagattgctccttggctgagttgctgtctgcataggctgttaacaattgtttctctggcagcagatcttgttcatcaggattgcatcatttctgggagaatggccaaggtccacagcctcaatacaaagactgtctgaagcatatgaggcctgttctctttctgaagcggcactcctcttcctgccagtcctcttcacaggattactgaagcagacttgttctgaatttctttcgttggattggttgtttattggacttttgtctgccagctgcttccgcctcacctgtctgatgcaatttcttcttctgaaatctgttggaattgttcataaaacactttttgtttgtcttctctgtgagtgaccagggagatcatacaggtcttgtgctttcagcaagtcatatagagaagagactgtcagaatgatgatacagagactgttggccatttctgaaaccaattaaaaagatggggtcttcagaactactagcagataatttggggggacttcatattcagaagtctatataaaggattcctcatgtccataacatgttggatgaggctctgcagctcacccccactctcagagtggtcagtctccattaattggaccccgtgatttccaatctctgctgtgttggacgtcatgagcattgcaatccctctgggagtcaccacatcagatacatcctactcagatatggctgctggatcagaaaaggaagtggaagccccctacctttcaagacgaagtggcactacaccaggatgtgaaagtccagcgaaagagacccaaggggcctagggggcagcacacccccagaagccaagtctattccaggcagtaccagggattagggtctgggctggaaaaatcctggtgttttgaatatgttcaggtccagttcagactcttgatcccacagccacttcttgagtgagccctgaatctgtggaggctagtccagcagttaatgagaagagcgtgtattccactcataattatgggaccactcagaggcatgggtgtcgaggactgccttatgctacgatcatccctcgttctgacctgaatggcctgccgtcgcctgtagaggaacgctgtggagacagcccgaactctgaaggagaaactgtacctacctggtgtccttgtggtctttctcaggatggcttccttctcaactgtgacaagtgcaggggaatgagcagggggaaggttattagacttcatcggcggaagcaggacaacatatcaggtggggatagcagtgcaacagaaagctgggatgaggagctttctccttccactgtgttgtatacagcaacacagcacacacctacaagcatcaccttaactgttagaagaaccaaacccaagaagcggaaaaagagtccagaaaagggtcgtgcagcaccaaagacgaagaaaatcaaggcatttcgagagggatcccggaagtccttgcggatgaagaattctccctctgaagcacagaatttagatgagaatacaactgagggctgggaaaatcggataagactatggactgaccagtatgaagaagctttcactaatcagtacagtgcagatgtacagaacgcgcttgaacaacacctacattctagcaaggaatttgtgggcaaacctactattttagacactattaataagactgaattggcctgtaataacacagttattggttcccaaatgcagttacagctgggaagagtcactcgtgttcaaaagcaccggaagatcctgagggctgcaagagatttggctttggacactcttataatagagtatcgtgggaaagtcatgttacgacagcaatttgaggtcaatgggcatttcttcaaaaaaccatacccctttgtgctcttctactcaaaattcaatggtgtagagatgtgtgtggatgcccgtactttcggtaatgatgctcggttcatcagaagatcatgtacaccaaatgcagaggtgcgacacatgattgcagatgggatgattcacctgtgcatctatgctgtgtctgccatcaccaaggatgctgaggtcaccatagcatttgattatgagtatagtaactgtaattataaagtggactgtgcctgtcacaagggaaaccggaattgtcctatacaaaaaaggaatcctaatgctacagaactgccactcctaccacctcctccaagcctacccaccattggagcagagactagacgtagaaaagcacgacggaaagagctagagatggagcagcagaatgaggcttcagaggagaataatgaccagcaatcacaagaagttccagaaaaagtaactgtatccagtgatcatgaggaagtagacaatccagaagaaaaaccagaagaagagaaagaagaggttatagatgaccaggagaacctagctcatagcaggaggaccagggaagatagaaaggtagaagccatcatgcatgcttttgaaaacttagagaaaagaaagaagcggcgggatcagcccttggaacagagcaactctgatgtagagattactacaaccacctcagagactcctgttggtgaagagacaaaaactgaagcccctgaatctgaagttagcaactctgtttcaaatgttaccatcccaagcaccccacagagtgttggtgtgaatacccggaggtcttcccaagcaggggatattgctgcagaaaaactagtccccaagccacctccagcaaagccttctaggccccggccgaagagtcgaatttctcggtacaggaccagttcagcccaaagactaaagcgtcagaagcaggccaatgcacagcaggcagaattgtcacaagctgccttggaagagggaggaagtaacagtttagtaactcctactgaagctggaagtctagacagttcaggagaaaacaggccattaacagggtctgacccaactgtggtgtcaattactggatcccatgtcaaccgtgctgcatctaaataccccaaaaccaaaaagtatctagttacagaatggttgaatgacaaagcagagaagcaagagtgccctgttgagtgccctttacgtatcacaacggatccaactgtactggcaacgaccctaaacatgttaccaggtcttatccattccccgttaatttgcaccacccccaaacactacattcgctttggctcaccctttatccctgagagacgtcgaaggccccttctgcctgatggcacattcagctcctgtaagaagcgctggataaaacaagccttagaagaagggatgactcaaacatcatctgtaccccaagagactagaactcagcacctataccaaagcaatgagaatagtagctcttctagtatctgcaaagacaatgcagacttgttgagcccattaaagaaatggaagtctcgctatctgatggagcagaatgtcaccaagttacttcggcctctgtctccagtcacaccaccccctcccaattcaggctcaaagagtccccagctggccacacctggctcatctcacccaggagaagaggagtgtcgaaatggatacagcctcatgttttcaccagtcacatctcttactactgctagtcgctgcaacactcctctacagtttgagctttgtcaccgaaaagacctggatttggcaaaagtaggataccttgactccaacactaacagctgtgctgatagaccttccctactcaactcaggtcattctgacctggctcctcatccctccctcggacccacttctgagactggtttcccaagcagaagtggagatggacatcagaccctcgtgagaaactcagaccaggcatttcggacagagttcaacttgatgtatgcctactcccctttgaatgctatgcctcgagcagatggactgtatcgaggatctcctctagtgggggataggaagcctttacatttggatgggggatattgttcccctgcagaaggattttccagcagatatgaacatggcttaatgaaagacctctctcgtggatccttgtcacctggtggtgaaagggcctgtgaaggagtcccatctgccccccagaacccaccacagaggaaaaaagtatccctgctggagtaccgaaaacggaaacaagaagctaaggaaaattctgctggtgggggaggtgactctgcacagagcaaaagcaagtctgcaggagctgggcaaggcagcagtaactccgtttccgacactggtgcccatggtgtgcagggatcctcagcccgaactccatcttcccctcacaaaaaattctccccatctcattcctctatgtcccatttggaggcggtaagcccatcagattccagaggcacttcttcatctcactgcagacctcaagagaatatcagcagtaggtggatggttcccacatcagtagaacgactccgagaaggagggagcatccccaaggtcctccgaagcagcgtgagggtggcccaaaagggagagccctctcccacatgggagagtaacatcacagagaaagactcagaccctgcagatggagaaggcccagagacattaagctcagcactctctaaaggagcaacagtttacagcccttccagatacagctaccagctcctgcagtgtgatagtcctcggacagaatcacaaagcctccttcagcagagttcctcccccttcagaggacatcctacacagtctccaggatacagttatcgaactactgcactgagacctggaaaccccccctctcacggttcttcagaatcatccctctcttccacgtcctattccagccccgcccaccctgtgtccacagactcgttggccccatttacggggacaccagggtattttagcagccagccacattctggaaacagcactggcagcaatcttccaaggaggagctgcccttctagtgctgctagccctaccctgcagggaccctcagactcgccaacctcagattcagtttctcagtccagcacaggaactctgagttccacctcctttcctcagaactctaggtcgtcattgccatcagacttacggactatcagtctgcccagtgctgggcagtcagctgtctaccaggcctccagggtatctgcggtttccaattcacagcactacccacaccgtgggagtgggggtgtgcaccagtaccgactccagccactgcaagggtcaggagtcaagactcagacgggactttcctagggcttctggatttgggcaaacagaactgaatgagcccatagctgcttccttccagctgcctctggaacctaggccgagcatattgctgaggaacggggggtacaaggtgccagaggattgggtctggtggacaagaaacaagacttgtggtcacaattggcctctggccttggagaaagctgtaaatcttgtctgaagcagagactataaagaagtttctccctgctgtcaagggtacattgttgacaagcaaatggtgtttcggttagtaacggttctaagtgcaatgagttgtgttgaagcctccgtctcccatccttgcctgtagcccgtagtcacttgtgcagtgaggacatctttttaaatttaaaaaaaaaaaaaaaaaaa

SEQ ID NO: 404 - RNA, 341 nt, synthetic construct
  source 1..341: mol_type = other RNA
cccacatcgcctgccactacttaagtccgattcacttcggctttagctccaagcctttaatctcgcgaagctctttttttttttttaacaacataggagctgtgattggctgttttcagccaatcagcactgactcatttgcatagcctttacaagcggtcacaaactcaagaaacgagcggttttaatagtcttttagaatattgtttatcgaaccgaataaggaactgtgctttgtgattcacatatcagtggaggggtgtggaaatggcaccttgatctcaccctcatcgaaagtggagttgatgtccttccctggctcgctacagacgcacttccgc

SEQ ID NO: 405 - RNA, 20 nt, synthetic construct
  source 1..20: mol_type = other RNA
aagtgttacagctcttttag

SEQ ID NO: 406 - RNA, 42 nt, synthetic construct
  source 1..42: mol_type = other RNA
aatttgtctagcaggttttctgacttcggtcggaaaacccct

SEQ ID NO: 407 - RNA, 54 nt, synthetic construct
  source 1..54: mol_type = other RNA
ggggtgagctgcagagccttcacatcctggtgtagtatcatctacattaacaaa

SEQ ID NO: 408 - RNA, 42 nt, synthetic construct
  source 1..42: mol_type = other RNA
aatttttggagcaggttttctgacttcggtcggaaaacccct

SEQ ID NO: 409 - RNA, 11 nt, synthetic construct
  source 1..11: mol_type = other RNA
aatttttggag

SEQ ID NO: 410 - RNA, 168 nt, synthetic construct
  source 1..168: mol_type = other RNA
cccaatttcactggtctacaatgaaagcaaaacagttctcttccccgctccccggtgtgtgagaggggctttgatccttctctggtttcctaggaaacgcgtatgtgctagagccacgctctgagacttccgcctcgtgcggtcccgcttcctttctgcctcctctgg

SEQ ID NO: 411 - RNA, 571 nt, synthetic construct
  source 1..571: mol_type = other RNA
cccacatcgcctgccactacttaagtccgattcacttcggctttagctccaagcctttaatctcgcgaagctctttttttttttttaacaacataggagctgtgattggctgttttcagccaatcagcactgactcatttgcatagcctttacaagcggtcacaaactcaagaaacgagcggttttaatagtcttttagaatattgtttatcgaaccgaataaggaactgtgctttgtgattcacatatcagtggaggggtgtggaaatggcaccttgatctcaccctcatcgaaagtggagttgatgtccttccctggctcgctacagacgcacttccgcaagtgttacagctcttttagaatttgtctagcaggttttctgacttcggtcggaaaacccctcccaatttcactggtctacaatgaaagcaaaacagttctcttccccgctccccggtgtgtgagaggggctttgatccttctctggtttcctaggaaacgcgtatgtgctagagccacgctctgagacttccgcctcgtgcggtcccgcttcctttctgcctcctctgg

SEQ ID NO: 412 - RNA, 571 nt, synthetic construct
  source 1..571: mol_type = other RNA
cccacatcgcctgccactacttaagtccgattcacttcggctttagctccaagcctttaatctcgcgaagctctttttttttttttaacaacataggagctgtgattggctgttttcagccaatcagcactgactcatttgcatagcctttacaagcggtcacaaactcaagaaacgagcggttttaatagtcttttagaatattgtttatcgaaccgaataaggaactgtgctttgtgattcacatatcagtggaggggtgtggaaatggcaccttgatctcaccctcatcgaaagtggagttgatgtccttccctggctcgctacagacgcacttccgcaagtgttacagctcttttagaatttttggagcaggttttctgacttcggtcggaaaacccctcccaatttcactggtctacaatgaaagcaaaacagttctcttccccgctccccggtgtgtgagaggggctttgatccttctctggtttcctaggaaacgcgtatgtgctagagccacgctctgagacttccgcctcgtgcggtcccgcttcctttctgcctcctctgg

SEQ ID NO: 413 - RNA, 569 nt, synthetic construct
  source 1..569: mol_type = other RNA
  misc_difference 342..359: note = This region may encompass one of the following sequences: uuuuucugcauucuugaa or gaauauuuuucugcauuc or uuacugaauauuuuucug or aaauguuacugaauauuu or aucuuaaauguuacugaa or aguuuaucuuaaauguua or cuucaaguuuaucuuaaa or uaguucuucaaguuuauc or ucagauaguucuucaagu or aguuaucagauaguucuu or uaccuaguuaucagauag or auaaauaccuaguuauca or guaaaauaaauaccuagu or aucuaguaaaauaaauac or aaaauaucuaguaaaaua or aaaggaaaauaucuagua or acagaaaaggaaaauauc or cuguaacagaaaaggaaa or gaauccuguaacagaaaa or augaggaauccuguaaca or uggacaugaggaauccug or uuauggacaugaggaauc or acauguuauggacaugag or auccaacauguuauggac or gccucauccaacauguua or gcagagccucauccaaca or gagcugcagagccucauc or ggggugagcugcagagcc or gagugggggugagcugca or ucugagagugggggugag or accacucugagagugggg or gacugaccacucugagag or auggagacugaccacucu or aauuaauggagacugacc or gguccaauuaauggagac or cacgggguccaauuaaug or gaaaucacgggguccaau or gauuggaaaucacggggu or gcagagauuggaaaucac or uccaacacagcagagauu or ugacguccaacacagcag or gcucaugacguccaacac or gcaaugcucaugacgucc; note = CONT. FROM ABOVE: or ggauugcaaugcucauga or cagagggauugcaaugcu or acucccagagggauugca or uggugacucccagaggga or ugauguggugacucccag or guaucugauguggugacu or aggauguaucugaugugg or ugaguaggauguaucuga or auaucugaguaggaugua or cagccauaucugaguagg or uccagcagccauaucuga or ucugauccagcagccaua or uacucugauccagcagcc or gcacuuacucugauccag or aaguagcacuuacucuga or cuagaaaguagcacuuac or acuaccuagaaaguagca or uaccuacuaccuagaaag or uaauguaccuacuaccua or acugauaauguaccuacu or cacagacugauaauguac or cuccacacagacugauaa or gcugucuccacacagacu or agaaggcugucuccacac or ccauaagaaggcugucuc or gcuauccauaagaaggcu or uauuagcuauccauaaga or uauccuauuagcuaucca or cauauuauccuauuagcu or uacuacauauuauccuau or gaaaauacuacauauuau or guuaagaaaauacuacau or aucugguuaagaaaauac or agaguaauaauuucucau or auauuagaguaauaauuu or uucaaauauuagaguaau or caccuuucaaauauuaga or cccaacaccuuucaaaua or gaacccccaacaccuuuc or uugaugaacccccaacac or ucaucuugaugaaccccc or accucucaucuugaugaa or aucauaccucucaucuug or uauuuaucauaccucuca or; note = CONT. FROM ABOVE: ucuuauauuuaucauacc or uggcaucuuauauuuauc or aacaauggcaucuuauau or guaaaaacaauggcaucu or uacagguaaaaacaaugg or gaaaguacagguaaaaac or cugaagaaaguacaggua or auacccugaagaaaguac or acaggauacccugaagaa or ccaagacaggauacccug or cuaccaagacaggauacc or auucacuaccaagacagg or cuuccauucacuaccaag or gcccucuuccauucacua or accaggcccucuuccauu or cagggaccaggcccucuu or ugccccagggaccaggcc or ugcacugccccagggacc or ccuucugcacugccccag or aagugccuucugcacugc or gaucaaagugccuucugc or gagaugaucaaagugccu or ugagugagaugaucaaag or ugcagugagugagaugau or acauuugcagugagugag or acaugacauuugcaguga or accucacaugacauuugc or augaaaccucacaugaca or cuuccaugaaaccucaca or uaauacuuccaugaaacc or ucucuuaauacuuccaug or uuggaucucuuaauacuu or cuuaauuggaucucuuaa or uucuucuuaauuggaucu or aacuauucuucuuaauug or cucagaacuauucuucuu or uuagacucagaacuauuc or cugguuuagacucagaac or cugggcugguuuagacuc or ccacucugggcugguuua or agaagccacucugggcug or ccuagagaagccacucug or uuuccccuagagaagcca or gggaguuuccccuagaga or; note = CONT. FROM ABOVE: gagcggggaguuuccccu or cagcugagcggggaguuu or uaccagcugagcggggag or aaacguaccagcugagcg or aacacaaacguaccagcu or ugacaaacacaaacguac or ccuaaugacaaacacaaa or gugucccuaaugacaaac or acaaggugucccuaauga or gagauacaaggugucccu or caccugagauacaaggug or gcaggcaccugagauaca or ugaaggcaggcaccugag or augucugaaggcaggcac or ggcagaugucugaaggca or guacaggcagaugucuga or agccaguacaggcagaug or caugaagccaguacaggc or uguaacaugaagccagua or uuguguguaacaugaagc or uggauuuguguguaacau or aaauguggauuugugugu or uuauuaaauguggauuug or agagaagggauacaaaag or uuaaaagagaagggauac or acaacuuaaaagagaagg or cucggacaacuuaaaaga or ggaaucucggacaacuua or cagggggaaucucggaca or gugagcagggggaaucuc or aaucugugagcaggggga or gggggaaucugugagcag or caagagggggaaucugug or aaggacaagagggggaau or gguaaaaggacaagaggg or agggagguaaaaggacaa or guacaagggagguaaaag or auuggguacaagggaggu or ggaagauuggguacaagg or agcaaggaagauugggua or cuguaagcaaggaagauu or ccuuucuguaagcaagga or cacuuccuuucuguaagc or gcuuccacuuccuuucug or; note = CONT. FROM ABOVE: ggggcuuccacuuccuuu or gguagggggcuuccacuu or ugaaagguagggggcuuc or cgucuugaaagguagggg or cacuucgucuugaaaggu or agugccacuucgucuuga or gguguagugccacuucgu or auccugguguagugccac or uucacauccugguguagu or ggacuuucacauccuggu or ucgcuggacuuucacauc or cucuuucgcuggacuuuc or ugggucucuuucgcugga or ccccuugggucucuuucg or cuaggccccuugggucuc or gcccccuaggccccuugg or gugcugcccccuaggccc or ggggugugcugcccccua or uucugggggugugcugcc or uuggcuucugggggugug or uagacuuggcuucugggg or uggaauagacuuggcuuc or uacugccuggaauagacu or ccugguacugccuggaau or uaaucccugguacugccu or gacccuaaucccugguac or gcccagacccuaaucccu or uuccagcccagacccuaa or gauuuuuccagcccagac or accaggauuuuuccagcc or aaaacaccaggauuuuuc or uauucaaaacaccaggau or gaacauauucaaaacacc or gaccugaacauauucaaa or aacuggaccugaacauau or gucugaacuggaccugaa or caagagucugaacuggac or gggaucaagagucugaac or gcugugggaucaagaguc or aaguggcugugggaucaa or ucaagaaguggcuguggg or cucacucaagaaguggcu or caccucacucaagaagug or acacccaccucacucaag or; note = CONT. FROM ABOVE: gagcaacacccaccucac or aauuagagcaacacccac or aggggaauuagagcaaca or gaaacaggggaauuagag or caagagaaacaggggaau or aauggcaagagaaacagg or gugaaaauggcaagagaa or ggacugugaaaauggcaa or cccagggacugugaaaau or gaauccccagggacugug or gggaagaauccccaggga or gaagggggaagaaucccc or uugcugaagggggaagaa or uugcuuugcugaaggggg or uugcuuugcuuugcugaa or uacaguugcuuugcuuug or ucugguacaguugcuuug or agaaaucugguacaguug or aacccagaaaucugguac or agauggaacaggaucuua or aauuuagauggaacagga or acuuaaauuuagauggaa or cccagacuuaaauuuaga or agcaacccagacuuaaau or aucccagcaacccagacu or cccuaaucccagcaaccc or agaaacccuaaucccagc or uuguaagaaacccuaauc or ccuacuuguaagaaaccc or uuuucccuacuuguaaga or ugagcuuuucccuacuug or uacuuugagcuuuucccu or aagaauacuuugagcuuu or caagaaagaauacuuuga or aaacacaagaaagaauac or uuaacaaacacaagaaag or cuacauuaacaaacacaa or aucaucuacauuaacaaa or aaggaaucaucuacauua or gcacuaaggaaucaucua or ggagcacuaaggaaucau or gccaaggagcacuaagga or uucgagccaaggagcacu or gagaauucgagccaagga or; note = CONT. FROM ABOVE: cuagugcagagaauucga or caccuagugcagagaauu or auucucaccuagugcaga or cagcaauucucaccuagu or guugucagcaauucucac or uccuuguugucagcaauu or cucauuccuuguugucag or aaucucucauuccuuguu or acaucaaucucucauucc or cuuuaacaucaaucucuc or aauagcuuuaacaucaau or aauucaauagcuuuaaca or uaucaaauucaauagcuu or uuucauaucaaauucaau or uuaaauuucauaucaaau or ggacauuaaauuucauau or uuccaggacauuaaauuu or aauguuuccaggacauua or uaccaaauguuuccagga or ccaccuaccaaauguuuc or cccucccaccuaccaaau or ccccucccucccaccuac or auuaacaaacacaagaaa or cauuaacaaacacaagaa or acauuaacaaacacaaga or uacauuaacaaacacaag or ucuacauuaacaaacaca or aucuacauuaacaaacac or caucuacauuaacaaaca or ucaucuacauuaacaaac or aaucaucuacauuaacaa or gaaucaucuacauuaaca or ggaaucaucuacauuaac or aggaaucaucuacauuaa or uaaggaaucaucuacauu or cuaaggaaucaucuacau or acuaaggaaucaucuaca or cacuaaggaaucaucuac or agcacuaaggaaucaucu or gagcacuaaggaaucauc or aggagcacuaaggaauca or aaggagcacuaaggaauc or caaggagcacuaaggaau or ccaaggagcacuaaggaa or; note = CONT. FROM ABOVE: agccaaggagcacuaagg or gagccaaggagcacuaag or cgagccaaggagcacuaa or ucgagccaaggagcacua or auucgagccaaggagcac or aauucgagccaaggagca or gaauucgagccaaggagc or agaauucgagccaaggag or agagaauucgagccaagg or cagagaauucgagccaag or gcagagaauucgagccaa or ugcagagaauucgagcca or gugcagagaauucgagcc or agugcagagaauucgagc or uagugcagagaauucgag or cuagugcagagaauucga or aaauguuuccaggacauu or caaauguuuccaggacau or ccaaauguuuccaggaca or accaaauguuuccaggac or cuaccaaauguuuccagg or ccuaccaaauguuuccag or accuaccaaauguuucca or caccuaccaaauguuucc
cccacatcgcctgccactacttaagtccgattcacttcggctttagctccaagcctttaatctcgcgaagctctttttttttttttaacaacataggagctgtgattggctgttttcagccaatcagcactgactcatttgcatagcctttacaagcggtcacaaactcaagaaacgagcggttttaatagtcttttagaatattgtttatcgaaccgaataaggaactgtgctttgtgattcacatatcagtggaggggtgtggaaatggcaccttgatctcaccctcatcgaaagtggagttgatgtccttccctggctcgctacagacgcacttccgcnnnnnnnnnnnnnnnnnnaatttttggagcaggttttctgacttcggtcggaaaacccctcccaatttcactggtctacaatgaaagcaaaacagttctcttccccgctccccggtgtgtgagaggggctttgatccttctctggtttcctaggaaacgcgtatgtgctagagccacgctctgagacttccgcctcgtgcggtcccgcttcctttctgcctcctctgg

SEQ ID NO: 414 - RNA, 569 nt, synthetic construct
  source 1..569: mol_type = other RNA
cccacatcgcctgccactacttaagtccgattcacttcggctttagctccaagcctttaatctcgcgaagctctttttttttttttaacaacataggagctgtgattggctgttttcagccaatcagcactgactcatttgcatagcctttacaagcggtcacaaactcaagaaacgagcggttttaatagtcttttagaatattgtttatcgaaccgaataaggaactgtgctttgtgattcacatatcagtggaggggtgtggaaatggcaccttgatctcaccctcatcgaaagtggagttgatgtccttccctggctcgctacagacgcacttccgcggggtgagctgcagagccaatttttggagcaggttttctgacttcggtcggaaaacccctcccaatttcactggtctacaatgaaagcaaaacagttctcttccccgctccccggtgtgtgagaggggctttgatccttctctggtttcctaggaaacgcgtatgtgctagagccacgctctgagacttccgcctcgtgcggtcccgcttcctttctgcctcctctgg

SEQ ID NO: 415 - RNA, 569 nt, synthetic construct
  source 1..569: mol_type = other RNA
cccacatcgcctgccactacttaagtccgattcacttcggctttagctccaagcctttaatctcgcgaagctctttttttttttttaacaacataggagctgtgattggctgttttcagccaatcagcactgactcatttgcatagcctttacaagcggtcacaaactcaagaaacgagcggttttaatagtcttttagaatattgtttatcgaaccgaataaggaactgtgctttgtgattcacatatcagtggaggggtgtggaaatggcaccttgatctcaccctcatcgaaagtggagttgatgtccttccctggctcgctacagacgcacttccgcttcacatcctggtgtagtaatttttggagcaggttttctgacttcggtcggaaaacccctcccaatttcactggtctacaatgaaagcaaaacagttctcttccccgctccccggtgtgtgagaggggctttgatccttctctggtttcctaggaaacgcgtatgtgctagagccacgctctgagacttccgcctcgtgcggtcccgcttcctttctgcctcctctgg

SEQ ID NO: 416 - RNA, 569 nt, synthetic construct
  source 1..569: mol_type = other RNA
cccacatcgcctgccactacttaagtccgattcacttcggctttagctccaagcctttaatctcgcgaagctctttttttttttttaacaacataggagctgtgattggctgttttcagccaatcagcactgactcatttgcatagcctttacaagcggtcacaaactcaagaaacgagcggttttaatagtcttttagaatattgtttatcgaaccgaataaggaactgtgctttgtgattcacatatcagtggaggggtgtggaaatggcaccttgatctcaccctcatcgaaagtggagttgatgtccttccctggctcgctacagacgcacttccgcatcatctacattaacaaaaatttttggagcaggttttctgacttcggtcggaaaacccctcccaatttcactggtctacaatgaaagcaaaacagttctcttccccgctccccggtgtgtgagaggggctttgatccttctctggtttcctaggaaacgcgtatgtgctagagccacgctctgagacttccgcctcgtgcggtcccgcttcctttctgcctcctctgg

SEQ ID NO: 417 - DNA, 18 bp, synthetic construct
  source 1..18: mol_type = other DNA
  modified_base 9: mod_base = OTHER; note = methylcytosine
  modified_base 15: mod_base = OTHER; note = methylcytosine
agatggaacaggatctta

SEQ ID NO: 418 - DNA, 18 bp, synthetic construct
  source 1..18: mol_type = other DNA
  modified_base 14: mod_base = OTHER; note = methylcytosine
aatttagatggaacagga

SEQ ID NO: 419 - DNA, 18 bp, synthetic construct
  source 1..18: mol_type = other DNA
  modified_base 2: mod_base = OTHER; note = methylcytosine
acttaaatttagatggaa

SEQ ID NO: 420 - DNA, 18 bp, synthetic construct
  source 1..18: mol_type = other DNA
  modified_base 1: mod_base = OTHER; note = methylcytosine
  modified_base 2: mod_base = OTHER; note = methylcytosine
  modified_base 3: mod_base = OTHER; note = methylcytosine
  modified_base 7: mod_base = OTHER; note = methylcytosine
cccagacttaaatttaga

SEQ ID NO: 421 - DNA, 18 bp, synthetic construct
  source 1..18: mol_type = other DNA
  modified_base 3: mod_base = OTHER; note = methylcytosine
  modified_base 6: mod_base = OTHER; note = methylcytosine
  modified_base 7: mod_base = OTHER; note = methylcytosine
  modified_base 8: mod_base = OTHER; note = methylcytosine
  modified_base 12: mod_base = OTHER; note = methylcytosine
agcaacccagacttaaat

SEQ ID NO: 422 - DNA, 18 bp, synthetic construct
  source 1..18: mol_type = other DNA
  modified_base 3: mod_base = OTHER; note = methylcytosine
  modified_base 4: mod_base = OTHER; note = methylcytosine
  modified_base 5: mod_base = OTHER; note = methylcytosine
  modified_base 8: mod_base = OTHER; note = methylcytosine
  modified_base 11: mod_base = OTHER; note = methylcytosine
  modified_base 12: mod_base = OTHER; note = methylcytosine
  modified_base 13: mod_base = OTHER; note = methylcytosine
  modified_base 17: mod_base = OTHER; note = methylcytosine
atcccagcaacccagact

SEQ ID NO: 423 - DNA, 18 bp, synthetic construct
  source 1..18: mol_type = other DNA
  modified_base 1: mod_base = OTHER; note = methylcytosine
  modified_base 2: mod_base = OTHER; note = methylcytosine
  modified_base 3: mod_base = OTHER; note = methylcytosine
  modified_base 8: mod_base = OTHER; note = methylcytosine
  modified_base 9: mod_base = OTHER; note = methylcytosine
  modified_base 10: mod_base = OTHER; note = methylcytosine
  modified_base 13: mod_base = OTHER; note = methylcytosine
  modified_base 16: mod_base = OTHER; note = methylcytosine
  modified_base 17: mod_base = OTHER; note = methylcytosine
  modified_base 18: mod_base = OTHER; note = methylcytosine
ccctaatcccagcaaccc

SEQ ID NO: 424 - DNA, 18 bp, synthetic construct
  source 1..18: mol_type = other DNA
  modified_base 6: mod_base = OTHER; note = methylcytosine
  modified_base 7: mod_base = OTHER; note = methylcytosine
  modified_base 8: mod_base = OTHER; note = methylcytosine
  modified_base 13: mod_base = OTHER; note = methylcytosine
  modified_base 14: mod_base = OTHER; note = methylcytosine
  modified_base 15: mod_base = OTHER; note = methylcytosine
  modified_base 18: mod_base = OTHER; note = methylcytosine
agaaaccctaatcccagc

SEQ ID NO: 425 - DNA, 18 bp, synthetic construct
  source 1..18: mol_type = other DNA
  modified_base 11: mod_base = OTHER; note = methylcytosine
  modified_base 12: mod_base = OTHER; note = methylcytosine
  modified_base 13: mod_base = OTHER; note = methylcytosine
  modified_base 18: mod_base = OTHER; note = methylcytosine
ttgtaagaaaccctaatc

SEQ ID NO: 426 - DNA, 18 bp, synthetic construct
  source 1..18: mol_type = other DNA
  modified_base 1: mod_base = OTHER; note = methylcytosine
  modified_base 2: mod_base = OTHER; note = methylcytosine
  modified_base 5: mod_base = OTHER; note = methylcytosine
  modified_base 16: mod_base = OTHER; note = methylcytosine
  modified_base 17: mod_base = OTHER; note = methylcytosine
  modified_base 18: mod_base = OTHER; note = methylcytosine
cctacttgtaagaaaccc

SEQ ID NO: 427 - DNA, 18 bp, synthetic construct
  source 1..18: mol_type = other DNA
  modified_base 5: mod_base = OTHER; note = methylcytosine
  modified_base 6: mod_base = OTHER; note = methylcytosine
  modified_base 7: mod_base = OTHER; note = methylcytosine
  modified_base 10: mod_base = OTHER; note = methylcytosine
ttttccctacttgtaaga

SEQ ID NO: 428 - DNA, 18 bp, synthetic construct
  source 1..18: mol_type = other DNA
  modified_base 5: mod_base = OTHER; note = methylcytosine
  modified_base 10: mod_base = OTHER; note = methylcytosine
  modified_base 11: mod_base = OTHER; note = methylcytosine
  modified_base 12: mod_base = OTHER; note = methylcytosine
  modified_base 15: mod_base = OTHER; note = methylcytosine
tgagcttttccctacttg

SEQ ID NO: 429 - DNA, 18 bp, synthetic construct
  source 1..18: mol_type = other DNA
  modified_base 3: mod_base = OTHER; note = methylcytosine
  modified_base 10: mod_base = OTHER; note = methylcytosine
  modified_base 15: mod_base = OTHER; note = methylcytosine
  modified_base 16: mod_base = OTHER; note = methylcytosine
  modified_base 17: mod_base = OTHER; note = methylcytosine
tactttgagcttttccct

SEQ ID NO: 430 - DNA, 18 bp, synthetic construct
  source 1..18: mol_type = other DNA
  modified_base 8: mod_base = OTHER; note = methylcytosine
  modified_base 15: mod_base = OTHER; note = methylcytosine
aagaatactttgagcttt

SEQ ID NO: 431 - DNA, 18 bp, synthetic construct
  source 1..18: mol_type = other DNA
  modified_base 1: mod_base = OTHER; note = methylcytosine
  modified_base 13: mod_base = OTHER; note = methylcytosine
caagaaagaatactttga

SEQ ID NO: 432 - DNA, 18 bp, synthetic construct
  source 1..18: mol_type = other DNA
  modified_base 4: mod_base = OTHER; note = methylcytosine
  modified_base 6: mod_base = OTHER; note = methylcytosine
  modified_base 18: mod_base = OTHER; note = methylcytosine
aaacacaagaaagaatac

SEQ ID NO: 433 - DNA, 18 bp, synthetic construct
  source 1..18: mol_type = other DNA
  modified_base 5: mod_base = OTHER; note = methylcytosine
  modified_base 9: mod_base = OTHER; note = methylcytosine
  modified_base 11: mod_base = OTHER; note = methylcytosine
ttaacaaacacaagaaag

SEQ ID NO: 434 - DNA, 18 bp, synthetic construct
  source 1..18: mol_type = other DNA
  modified_base 1: mod_base = OTHER; note = methylcytosine
  modified_base 4: mod_base = OTHER; note = methylcytosine
  modified_base 10: mod_base = OTHER; note = methylcytosine
  modified_base 14: mod_base = OTHER; note = methylcytosine
  modified_base 16: mod_base = OTHER; note = methylcytosine
ctacattaacaaacacaa

SEQ ID NO: 435 - DNA, 18 bp, synthetic construct
  source 1..18: mol_type = other DNA
  modified_base 3: mod_base = OTHER; note = methylcytosine
  modified_base 6: mod_base = OTHER; note = methylcytosine
  modified_base 9: mod_base = OTHER; note = methylcytosine
  modified_base 15: mod_base = OTHER; note = methylcytosine
atcatctacattaacaaa

SEQ ID NO: 436 - DNA, 18 bp, synthetic construct
  source 1..18: mol_type = other DNA
  modified_base 8: mod_base = OTHER; note = methylcytosine
  modified_base 11: mod_base = OTHER; note = methylcytosine
  modified_base 14: mod_base = OTHER; note = methylcytosine
aaggaatcatctacatta

SEQ ID NO: 437 - DNA, 18 bp, synthetic construct
  source 1..18: mol_type = other DNA
  modified_base 2: mod_base = OTHER; note = methylcytosine
  modified_base 4: mod_base = OTHER; note = methylcytosine
  modified_base 13: mod_base = OTHER; note = methylcytosine
  modified_base 16: mod_base = OTHER; note = methylcytosine
gcactaaggaatcatcta

SEQ ID NO: 438 - DNA, 18 bp, synthetic construct
  source 1..18: mol_type = other DNA
  modified_base 5: mod_base = OTHER; note = methylcytosine
  modified_base 7: mod_base = OTHER; note = methylcytosine
  modified_base 16: mod_base = OTHER; note = methylcytosine
ggagcactaaggaatcat

SEQ ID NO: 439 - DNA, 18 bp, synthetic construct
  source 1..18: mol_type = other DNA
  modified_base 2: mod_base = OTHER; note = methylcytosine
  modified_base 3: mod_base = OTHER; note = methylcytosine
  modified_base 10: mod_base = OTHER; note = methylcytosine
  modified_base 12: mod_base = OTHER; note = methylcytosine
gccaaggagcactaagga

SEQ ID NO: 440 - DNA, 18 bp, synthetic construct
  source 1..18: mol_type = other DNA
  modified_base 3: mod_base = OTHER; note = methylcytosine
  modified_base 7: mod_base = OTHER; note = methylcytosine
  modified_base 8: mod_base = OTHER; note = methylcytosine
  modified_base 15: mod_base = OTHER; note = methylcytosine
  modified_base 17: mod_base = OTHER; note = methylcytosine
ttcgagccaaggagcact

SEQ ID NO: 441 - DNA, 18 bp, synthetic construct
  source 1..18: mol_type = other DNA
  modified_base 8: mod_base = OTHER; note = methylcytosine
  modified_base 12: mod_base = OTHER; note = methylcytosine
  modified_base 13: mod_base = OTHER; note = methylcytosine
gagaattcgagccaagga

SEQ ID NO: 442 - DNA, 18 bp, synthetic construct
  source 1..18: mol_type = other DNA
  modified_base 1: mod_base = OTHER; note = methylcytosine
  modified_base 7: mod_base = OTHER; note = methylcytosine
  modified_base 16: mod_base = OTHER; note = methylcytosine
ctagtgcagagaattcga

SEQ ID NO: 443 - DNA, 18 bp, synthetic construct
  source 1..18: mol_type = other DNA
  modified_base 1: mod_base = OTHER; note = methylcytosine
  modified_base 3: mod_base = OTHER; note = methylcytosine
  modified_base 4: mod_base = OTHER; note = methylcytosine
  modified_base 10: mod_base = OTHER; note = methylcytosine
cacctagtgcagagaatt

SEQ ID NO: 444 - DNA, 18 bp, synthetic construct
  source 1..18: mol_type = other DNA
  modified_base 4: mod_base = OTHER; note = methylcytosine
  modified_base 6: mod_base = OTHER; note = methylcytosine
  modified_base 8: mod_base = OTHER; note = methylcytosine
  modified_base 9: mod_base = OTHER; note = methylcytosine
  modified_base 15: mod_base = OTHER; note = methylcytosine
attctcacctagtgcaga

SEQ ID NO: 445 - DNA, 18 bp, synthetic construct
  source 1..18: mol_type = other DNA
  modified_base 1: mod_base = OTHER; note = methylcytosine
  modified_base 4: mod_base = OTHER; note = methylcytosine
  modified_base 9: mod_base = OTHER; note = methylcytosine
  modified_base 11: mod_base = OTHER; note = methylcytosine
  modified_base 13: mod_base = OTHER; note = methylcytosine
  modified_base 14: mod_base = OTHER; note = methylcytosine
cagcaattctcacctagt

SEQ ID NO: 446 - DNA, 18 bp, synthetic construct
  source 1..18: mol_type = other DNA
  modified_base 6: mod_base = OTHER; note = methylcytosine
  modified_base 9: mod_base = OTHER; note = methylcytosine
  modified_base 14: mod_base = OTHER; note = methylcytosine
  modified_base 16: mod_base = OTHER; note = methylcytosine
  modified_base 18: mod_base = OTHER; note = methylcytosine
gttgtcagcaattctcac

SEQ ID NO: 447 - DNA, 18 bp, synthetic construct
  source 1..18: mol_type = other DNA
  modified_base 2: mod_base = OTHER; note = methylcytosine
  modified_base 3: mod_base = OTHER; note = methylcytosine
  modified_base 11: mod_base = OTHER; note = methylcytosine
  modified_base 14: mod_base = OTHER; note = methylcytosine
tccttgttgtcagcaatt

SEQ ID NO: 448 - DNA, 18 bp, synthetic construct
  source 1..18: mol_type = other DNA
  modified_base 1: mod_base = OTHER; note = methylcytosine
  modified_base 3: mod_base = OTHER; note = methylcytosine
  modified_base 7: mod_base = OTHER; note = methylcytosine
  modified_base 8: mod_base = OTHER; note = methylcytosine
  modified_base 16: mod_base = OTHER; note = methylcytosine
ctcattccttgttgtcag

SEQ ID NO: 449 - DNA, 18 bp, synthetic construct
  source 1..18: mol_type = other DNA
  modified_base 4: mod_base = OTHER; note = methylcytosine
  modified_base 6: mod_base = OTHER; note = methylcytosine
  modified_base 8: mod_base = OTHER; note = methylcytosine
  modified_base 12: mod_base = OTHER; note = methylcytosine
  modified_base 13: mod_base = OTHER; note = methylcytosine
aatctctcattccttgtt

SEQ ID NO: 450 - DNA, 18 bp, synthetic construct
  source 1..18: mol_type = other DNA
  modified_base 2: mod_base = OTHER; note = methylcytosine
  modified_base 5: mod_base = OTHER; note = methylcytosine
  modified_base 9: mod_base = OTHER; note = methylcytosine
  modified_base 11: mod_base = OTHER; note = methylcytosine
  modified_base 13: mod_base = OTHER; note = methylcytosine
  modified_base 17: mod_base = OTHER; note = methylcytosine
  modified_base 18: mod_base = OTHER; note = methylcytosine
acatcaatctctcattcc

SEQ ID NO: 451 - DNA, 18 bp, synthetic construct
  source 1..18: mol_type = other DNA
  modified_base 1: mod_base = OTHER; note = methylcytosine
  modified_base 7: mod_base = OTHER; note = methylcytosine
  modified_base 10: mod_base = OTHER; note = methylcytosine
  modified_base 14: mod_base = OTHER; note = methylcytosine
  modified_base 16: mod_base = OTHER; note = methylcytosine
  modified_base 18: mod_base = OTHER; note = methylcytosine
ctttaacatcaatctctc

SEQ ID NO: 452 - DNA, 18 bp, synthetic construct
  source 1..18: mol_type = other DNA
  modified_base 6: mod_base = OTHER; note = methylcytosine
  modified_base 12: mod_base = OTHER; note = methylcytosine
  modified_base 15: mod_base = OTHER; note = methylcytosine
aatagctttaacatcaat

SEQ ID NO: 453 - DNA, 18 bp, synthetic construct
  source 1..18: mol_type = other DNA
  modified_base 5: mod_base = OTHER; note = methylcytosine
  modified_base 11: mod_base = OTHER; note = methylcytosine
  modified_base 17: mod_base = OTHER; note = methylcytosine
aattcaatagctttaaca

SEQ ID NO: 454 - DNA, 18 bp, synthetic construct
  source 1..18: mol_type = other DNA
  modified_base 4: mod_base = OTHER; note = methylcytosine
  modified_base 10: mod_base = OTHER; note = methylcytosine
  modified_base 16: mod_base = OTHER; note = methylcytosine
tatcaaattcaatagctt

SEQ ID NO: 455 - DNA, 18 bp, synthetic construct
  source 1..18: mol_type = other DNA
  modified_base 4: mod_base = OTHER; note = methylcytosine
  modified_base 9: mod_base = OTHER; note = methylcytosine
  modified_base 15: mod_base = OTHER; note = methylcytosine
tttcatatcaaattcaat

SEQ ID NO: 456 - DNA, 18 bp, synthetic construct
  source 1..18: mol_type = other DNA
  modified_base 9: mod_base = OTHER; note = methylcytosine
  modified_base 14: mod_base = OTHER; note = methylcytosine
ttaaatttcatatcaaat

SEQ ID NO: 457 - DNA, 18 bp, synthetic construct
  source 1..18: mol_type = other DNA
  modified_base 4: mod_base = OTHER; note = methylcytosine
  modified_base 14: mod_base = OTHER; note = methylcytosine
ggacattaaatttcatat

SEQ ID NO: 458 - DNA, 18 bp, synthetic construct
  source 1..18: mol_type = other DNA
  modified_base 3: mod_base = OTHER; note = methylcytosine
  modified_base 4: mod_base = OTHER; note = methylcytosine
  modified_base 9: mod_base = OTHER; note = methylcytosine
ttccaggacattaaattt

SEQ ID NO: 459 - DNA, 18 bp, synthetic construct
  source 1..18: mol_type = other DNA
  modified_base 8: mod_base = OTHER; note = methylcytosine
  modified_base 9: mod_base = OTHER; note = methylcytosine
  modified_base 14: mod_base = OTHER; note = methylcytosine
aatgtttccaggacatta

SEQ ID NO: 460 - DNA, 18 bp, synthetic construct
  source 1..18: mol_type = other DNA
  modified_base 3: mod_base = OTHER; note = methylcytosine
  modified_base 4: mod_base = OTHER; note = methylcytosine
  modified_base 13: mod_base = OTHER; note = methylcytosine
  modified_base 14: mod_base = OTHER; note = methylcytosine
taccaaatgtttccagga

SEQ ID NO: 461 - DNA, 18 bp, synthetic construct
  source 1..18: mol_type = other DNA
  modified_base 1: mod_base = OTHER; note = methylcytosine
  modified_base 2: mod_base = OTHER; note = methylcytosine
  modified_base 4: mod_base = OTHER; note = methylcytosine
  modified_base 5: mod_base = OTHER; note = methylcytosine
  modified_base 8: mod_base = OTHER; note = methylcytosine
  modified_base 9: mod_base = OTHER; note = methylcytosine
  modified_base 18: mod_base = OTHER; note = methylcytosine
ccacctaccaaatgtttc

SEQ ID NO: 462 - DNA, 18 bp, synthetic construct
  source 1..18: mol_type = other DNA
  modified_base 1: mod_base = OTHER; note = methylcytosine
  modified_base 2: mod_base = OTHER; note = methylcytosine
  modified_base 3: mod_base = OTHER; note = methylcytosine
  modified_base 5: mod_base = OTHER; note = methylcytosine
  modified_base 6: mod_base = OTHER; note = methylcytosine
  modified_base 7: mod_base = OTHER; note = methylcytosine
  modified_base 9: mod_base = OTHER; note = methylcytosine
  modified_base 10: mod_base = OTHER; note = methylcytosine
  modified_base 13: mod_base = OTHER; note = methylcytosine
  modified_base 14: mod_base = OTHER; note = methylcytosine
ccctcccacctaccaaat

SEQ ID NO: 463 - DNA, 18 bp, synthetic construct
  source 1..18: mol_type = other DNA
  modified_base 1: mod_base = OTHER; note = methylcytosine
  modified_base 2: mod_base = OTHER; note = methylcytosine
  modified_base 3: mod_base = OTHER; note = methylcytosine
  modified_base 4: mod_base = OTHER; note = methylcytosine
  modified_base 6: mod_base = OTHER; note = methylcytosine
  modified_base 7: mod_base = OTHER; note = methylcytosine
  modified_base 8: mod_base = OTHER; note = methylcytosine
  modified_base 10: mod_base = OTHER; note = methylcytosine
  modified_base 11: mod_base = OTHER; note = methylcytosine
  modified_base 12: mod_base = OTHER; note = methylcytosine
  modified_base 14: mod_base = OTHER; note = methylcytosine
  modified_base 15: mod_base = OTHER; note = methylcytosine
  modified_base 18: mod_base = OTHER; note = methylcytosine
cccctccctcccacctac

SEQ ID NO: 464 - DNA, 18 bp, synthetic construct
  source 1..18: mol_type = other DNA
  modified_base 6: mod_base = OTHER; note = methylcytosine
  modified_base 10: mod_base = OTHER; note = methylcytosine
  modified_base 12: mod_base = OTHER; note = methylcytosine
attaacaaacacaagaaa

SEQ ID NO: 465 - DNA, 18 bp, synthetic construct
  source 1..18: mol_type = other DNA
  modified_base 1: mod_base = OTHER; note = methylcytosine
  modified_base 7: mod_base = OTHER; note = methylcytosine
  modified_base 11: mod_base = OTHER; note = methylcytosine
  modified_base 13: mod_base = OTHER; note = methylcytosine
cattaacaaacacaagaa

SEQ ID NO: 466 - DNA, 18 bp, synthetic construct
  source 1..18: mol_type = other DNA
  modified_base 2: mod_base = OTHER; note = methylcytosine
  modified_base 8: mod_base = OTHER; note = methylcytosine
  modified_base 12: mod_base = OTHER; note = methylcytosine
  modified_base 14: mod_base = OTHER; note = methylcytosine
acattaacaaacacaaga

SEQ ID NO: 467 - DNA, 18 bp, synthetic construct
  source 1..18: mol_type = other DNA
  modified_base 3: mod_base = OTHER; note = methylcytosine
  modified_base 9: mod_base = OTHER; note = methylcytosine
  modified_base 13: mod_base = OTHER; note = methylcytosine
  modified_base 15: mod_base = OTHER; note = methylcytosine
tacattaacaaacacaag

SEQ ID NO: 468 - DNA, 18 bp, synthetic construct
  source 1..18: mol_type = other DNA
  modified_base 2: mod_base = OTHER; note = methylcytosine
  modified_base 5: mod_base = OTHER; note = methylcytosine
  modified_base 11: mod_base = OTHER; note = methylcytosine
  modified_base 15: mod_base = OTHER; note = methylcytosine
  modified_base 17: mod_base = OTHER; note = methylcytosine
tctacattaacaaacaca

SEQ ID NO: 469 - DNA, 18 bp, synthetic construct
  source 1..18: mol_type = other DNA
  modified_base 3: mod_base = OTHER; note = methylcytosine
  modified_base 6: mod_base = OTHER; note = methylcytosine
  modified_base 12: mod_base = OTHER; note = methylcytosine
  modified_base 16: mod_base = OTHER; note = methylcytosine
  modified_base 18: mod_base = OTHER; note = methylcytosine
atctacattaacaaacac

SEQ ID NO: 470 - DNA, 18 bp, synthetic construct
  source 1..18: mol_type = other DNA
  modified_base 1: mod_base = OTHER; note = methylcytosine
  modified_base 4: mod_base = OTHER; note = methylcytosine
  modified_base 7: mod_base = OTHER; note = methylcytosine
  modified_base 13: mod_base = OTHER; note = methylcytosine
  modified_base 17: mod_base = OTHER; note = methylcytosine
catctacattaacaaaca

SEQ ID NO: 471 - DNA, 18 bp, synthetic construct
  source 1..18: mol_type = other DNA
  modified_base 2: mod_base = OTHER; note = methylcytosine
  modified_base 5: mod_base = OTHER; note = methylcytosine
  modified_base 8: mod_base = OTHER; note = methylcytosine
  modified_base 14: mod_base = OTHER; note = methylcytosine
  modified_base 18: mod_base = OTHER; note = methylcytosine
tcatctacattaacaaac

SEQ ID NO: 472 - DNA, 18 bp, synthetic construct
  source 1..18: mol_type = other DNA
  modified_base 4: mod_base = OTHER; note = methylcytosine
  modified_base 7: mod_base = OTHER; note = methylcytosine
  modified_base 10: mod_base = OTHER; note = methylcytosine
  modified_base 16: mod_base = OTHER; note = methylcytosine
aatcatctacattaacaa

SEQ ID NO: 473 - DNA, 18 bp, synthetic construct
  source 1..18: mol_type = other DNA
  modified_base 5: mod_base = OTHER; note = methylcytosine
  modified_base 8: mod_base = OTHER; note = methylcytosine
  modified_base 11: mod_base = OTHER; note = methylcytosine
  modified_base 17: mod_base = OTHER; note = methylcytosine
gaatcatctacattaaca

SEQ ID NO: 474 - DNA, 18 bp, synthetic construct
  source 1..18: mol_type = other DNA
  modified_base 6: mod_base = OTHER; note = methylcytosine
  modified_base 9: mod_base = OTHER; note = methylcytosine
  modified_base 12: mod_base = OTHER; note = methylcytosine
  modified_base 18: mod_base = OTHER; note = methylcytosine
ggaatcatctacattaac

SEQ ID NO: 475 - DNA, 18 bp, synthetic construct
  source 1..18: mol_type = other DNA
  modified_base 7: mod_base = OTHER; note = methylcytosine
  modified_base 10: mod_base = OTHER; note = methylcytosine
  modified_base 13: mod_base = OTHER; note = methylcytosine
aggaatcatctacattaa

SEQ ID NO: 476 - DNA, 18 bp, synthetic construct
  source 1..18: mol_type = other DNA
  modified_base 9: mod_base = OTHER; note = methylcytosine
  modified_base 12: mod_base = OTHER; note = methylcytosine
  modified_base 15: mod_base = OTHER; note = methylcytosine
taaggaatcatctacatt

SEQ ID NO: 477 - DNA, 18 bp, synthetic construct
  source 1..18: mol_type = other DNA
  modified_base 1: mod_base = OTHER; note = methylcytosine
  modified_base 10: mod_base = OTHER; note = methylcytosine
  modified_base 13: mod_base = OTHER; note = methylcytosine
  modified_base 16: mod_base = OTHER; note = methylcytosine
ctaaggaatcatctacat

SEQ ID NO: 478 - DNA, 18 bp, synthetic construct
  source 1..18: mol_type = other DNA
  modified_base 2: mod_base = OTHER; note = methylcytosine
  modified_base 11: mod_base = OTHER; note = methylcytosine
  modified_base 14: mod_base = OTHER; note = methylcytosine
  modified_base 17: mod_base = OTHER; note = methylcytosine
actaaggaatcatctaca

SEQ ID NO: 479 - DNA, 18 bp, synthetic construct
  source 1..18: mol_type = other DNA
  modified_base 1: mod_base = OTHER; note = methylcytosine
  modified_base 3: mod_base = OTHER; note = methylcytosine
  modified_base 12: mod_base = OTHER; note = methylcytosine
  modified_base 15: mod_base = OTHER; note = methylcytosine
  modified_base 18: mod_base = OTHER; note = methylcytosine
cactaaggaatcatctac

SEQ ID NO: 480 - DNA, 18 bp, synthetic construct
  source 1..18: mol_type = other DNA
  modified_base 3: mod_base = OTHER; note = methylcytosine
  modified_base 5: mod_base = OTHER; note = methylcytosine
  modified_base 14: mod_base = OTHER; note = methylcytosine
  modified_base 17: mod_base = OTHER; note = methylcytosine
agcactaaggaatcatct

SEQ ID NO: 481 - DNA, 18 bp, synthetic construct
  source 1..18: mol_type = other DNA
  modified_base 4: mod_base = OTHER; note = methylcytosine
  modified_base 6: mod_base = OTHER; note = methylcytosine
  modified_base 15: mod_base = OTHER; note = methylcytosine
  modified_base 18: mod_base = OTHER; note = methylcytosine
gagcactaaggaatcatc

SEQ ID NO: 482 - DNA, 18 bp, synthetic construct
  source 1..18: mol_type = other DNA
  modified_base 6: mod_base = OTHER; note = methylcytosine
  modified_base 8: mod_base = OTHER; note = methylcytosine
  modified_base 17: mod_base = OTHER; note = methylcytosine
aggagcactaaggaatca

SEQ ID NO: 483 - DNA, 18 bp, synthetic construct
  source 1..18: mol_type = other DNA
  modified_base 7: mod_base = OTHER; note = methylcytosine
  modified_base 9: mod_base = OTHER; note = methylcytosine
  modified_base 18: mod_base = OTHER; note = methylcytosine
aaggagcactaaggaatc

SEQ ID NO: 484 - DNA, 18 bp, synthetic construct
  source 1..18: mol_type = other DNA
  modified_base 1: mod_base = OTHER; note = methylcytosine
  modified_base 8: mod_base = OTHER; note = methylcytosine
  modified_base 10: mod_base = OTHER; note = methylcytosine
caaggagcactaaggaat

SEQ ID NO: 485 - DNA, 18 bp, synthetic construct
  source 1..18: mol_type = other DNA
  modified_base 1: mod_base = OTHER; note = methylcytosine
  modified_base 2: mod_base = OTHER; note = methylcytosine
  modified_base 9: mod_base = OTHER; note = methylcytosine
  modified_base 11: mod_base = OTHER; note = methylcytosine
ccaaggagcactaaggaa

SEQ ID NO: 486 - DNA, 18 bp, synthetic construct
  source 1..18: mol_type = other DNA
  modified_base 3: mod_base = OTHER; note = methylcytosine
  modified_base 4: mod_base = OTHER; note = methylcytosine
  modified_base 11: mod_base = OTHER; note = methylcytosine
  modified_base 13: mod_base = OTHER; note = methylcytosine
agccaaggagcactaagg

SEQ ID NO: 487 - DNA, 18 bp, synthetic construct
  source 1..18: mol_type = other DNA
  modified_base 4: mod_base = OTHER; note = methylcytosine
  modified_base 5: mod_base = OTHER; note = methylcytosine
  modified_base 12: mod_base = OTHER; note = methylcytosine
  modified_base 14: mod_base = OTHER; note = methylcytosine
gagccaaggagcactaag

SEQ ID NO: 488 - DNA, 18 bp, synthetic construct
  source 1..18: mol_type = other DNA
  modified_base 1: mod_base = OTHER; note = methylcytosine
  modified_base 5: mod_base = OTHER; note = methylcytosine
  modified_base 6: mod_base = OTHER; note = methylcytosine
  modified_base 13: mod_base = OTHER; note = methylcytosine
  modified_base 15: mod_base = OTHER; note = methylcytosine
cgagccaaggagcactaa

SEQ ID NO: 489 - DNA, 18 bp, synthetic construct
  source 1..18: mol_type = other DNA
  modified_base 2: mod_base = OTHER; note = methylcytosine
  modified_base 6: mod_base = OTHER; note = methylcytosine
  modified_base 7: mod_base = OTHER; note = methylcytosine
  modified_base 14: mod_base = OTHER; note = methylcytosine
  modified_base 16: mod_base = OTHER; note = methylcytosine
tcgagccaaggagcacta

SEQ ID NO: 490 - DNA, 18 bp, synthetic construct
  source 1..18: mol_type = other DNA
  modified_base 4: mod_base = OTHER; note = methylcytosine
  modified_base 8: mod_base = OTHER; note = methylcytosine
  modified_base 9: mod_base = OTHER; note = methylcytosine
  modified_base 16: mod_base = OTHER; note = methylcytosine
  modified_base 18: mod_base = OTHER; note = methylcytosine
attcgagccaaggagcac

SEQ ID NO: 491 - DNA, 18 bp, synthetic construct
  source 1..18: mol_type = other DNA
  modified_base 5: mod_base = OTHER; note = methylcytosine
  modified_base 9: mod_base = OTHER; note = methylcytosine
  modified_base 10: mod_base = OTHER; note = methylcytosine
  modified_base 17: mod_base = OTHER; note = methylcytosine
aattcgagccaaggagca

SEQ ID NO: 492 - DNA, 18 bp, synthetic construct
  source 1..18: mol_type = other DNA
  modified_base 6: mod_base = OTHER; note = methylcytosine
  modified_base 10: mod_base = OTHER; note = methylcytosine
  modified_base 11: mod_base = OTHER; note = methylcytosine
  modified_base 18: mod_base = OTHER; note = methylcytosine
gaattcgagccaaggagc

SEQ ID NO: 493 - DNA, 18 bp, synthetic construct
  source 1..18: mol_type = other DNA
  modified_base 7: mod_base = OTHER; note = methylcytosine
  modified_base 11: mod_base = OTHER; note = methylcytosine
  modified_base 12: mod_base = OTHER; note = methylcytosine
agaattcgagccaaggag

SEQ ID NO: 494 - DNA, 18 bp, synthetic construct
  source 1..18: mol_type = other DNA
  modified_base 9: mod_base = OTHER; note = methylcytosine
  modified_base 13: mod_base = OTHER; note = methylcytosine
  modified_base 14: mod_base = OTHER; note = methylcytosine
agagaattcgagccaagg

SEQ ID NO: 495 - DNA, 18 bp, synthetic construct
  source 1..18: mol_type = other DNA
  modified_base 1: mod_base = OTHER; note = methylcytosine
  modified_base 10: mod_base = OTHER; note = methylcytosine
  modified_base 14: mod_base = OTHER; note = methylcytosine
  modified_base 15: mod_base = OTHER; note = methylcytosine
cagagaattcgagccaag

SEQ ID NO: 496 - DNA, 18 bp, synthetic construct
  source 1..18: mol_type = other DNA
  modified_base 2: mod_base = OTHER; note = methylcytosine
  modified_base 11: mod_base = OTHER; note = methylcytosine
  modified_base 15: mod_base = OTHER; note = methylcytosine
  modified_base 16: mod_base = OTHER; note = methylcytosine
gcagagaattcgagccaa

SEQ ID NO: 497 - DNA, 18 bp, synthetic construct
  source 1..18: mol_type = other DNA
  modified_base 3: mod_base = OTHER; note = methylcytosine
  modified_base 12: mod_base = OTHER; note = methylcytosine
  modified_base 16: mod_base = OTHER; note = methylcytosine
  modified_base 17: mod_base = OTHER; note = methylcytosine
tgcagagaattcgagcca

SEQ ID NO: 498 - DNA, 18 bp, synthetic construct
  source 1..18: mol_type = other DNA
  modified_base 4: mod_base = OTHER; note = methylcytosine
  modified_base 13: mod_base = OTHER; note = methylcytosine
  modified_base 17: mod_base = OTHER; note = methylcytosine
  modified_base 18: mod_base = OTHER; note = methylcytosine
gtgcagagaattcgagcc

SEQ ID NO: 499 - DNA, 18 bp, synthetic construct
  source 1..18: mol_type = other DNA
  modified_base 5: mod_base = OTHER; note = methylcytosine
  modified_base 14: mod_base = OTHER; note = methylcytosine
  modified_base 18: mod_base = OTHER; note = methylcytosine
agtgcagagaattcgagc

SEQ ID NO: 500 - DNA, 18 bp, synthetic construct
  source 1..18: mol_type = other DNA
  modified_base 6: mod_base = OTHER; note = methylcytosine
  modified_base 15: mod_base = OTHER; note = methylcytosine
tagtgcagagaattcgag

SEQ ID NO: 501 - DNA, 18 bp, synthetic construct
  source 1..18: mol_type = other DNA
  modified_base 1: mod_base = OTHER; note = methylcytosine
  modified_base 7: mod_base = OTHER; note = methylcytosine
  modified_base 16: mod_base = OTHER; note = methylcytosine
ctagtgcagagaattcga

SEQ ID NO: 502 - DNA, 18 bp, synthetic construct
  source 1..18: mol_type = other DNA
  modified_base 9: mod_base = OTHER; note = methylcytosine
  modified_base 10: mod_base = OTHER; note = methylcytosine
  modified_base 15: mod_base = OTHER; note = methylcytosine
aaatgtttccaggacatt

SEQ ID NO: 503 - DNA, 18 bp, synthetic construct
  source 1..18: mol_type = other DNA
  modified_base 1: mod_base = OTHER; note = methylcytosine
  modified_base 10: mod_base = OTHER; note = methylcytosine
  modified_base 11: mod_base = OTHER; note = methylcytosine
  modified_base 16: mod_base = OTHER; note = methylcytosine
caaatgtttccaggacat

SEQ ID NO: 504 - DNA, 18 bp, synthetic construct
  source 1..18: mol_type = other DNA
  modified_base 1: mod_base = OTHER; note = methylcytosine
  modified_base 2: mod_base = OTHER; note = methylcytosine
  modified_base 11: mod_base = OTHER; note = methylcytosine
  modified_base 12: mod_base = OTHER; note = methylcytosine
  modified_base 17: mod_base = OTHER; note = methylcytosine
ccaaatgtttccaggaca

SEQ ID NO: 505 - DNA, 18 bp, synthetic construct
  source 1..18: mol_type = other DNA
  modified_base 2: mod_base = OTHER; note = methylcytosine
  modified_base 3: mod_base = OTHER; note = methylcytosine
  modified_base 12: mod_base = OTHER; note = methylcytosine
  modified_base 13: mod_base = OTHER; note = methylcytosine
  modified_base 18: mod_base = OTHER; note = methylcytosine
accaaatgtttccaggac

SEQ ID NO: 506 - DNA, 18 bp, synthetic construct
  source 1..18: mol_type = other DNA
  modified_base 1: mod_base = OTHER; note = methylcytosine
  modified_base 4: mod_base = OTHER; note = methylcytosine
  modified_base 5: mod_base = OTHER; note = methylcytosine
  modified_base 14: mod_base = OTHER; note = methylcytosine
  modified_base 15: mod_base = OTHER; note = methylcytosine
ctaccaaatgtttccagg

SEQ ID NO: 507 - DNA, 18 bp, synthetic construct
  source 1..18: mol_type = other DNA
  modified_base 1: mod_base = OTHER; note = methylcytosine
  modified_base 2: mod_base = OTHER; note = methylcytosine
  modified_base 5: mod_base = OTHER; note = methylcytosine
  modified_base 6: mod_base = OTHER; note = methylcytosine
  modified_base 15: mod_base = OTHER; note = methylcytosine
  modified_base 16: mod_base = OTHER; note = methylcytosine
cctaccaaatgtttccag

SEQ ID NO: 508 - DNA, 18 bp, synthetic construct
  source 1..18: mol_type = other DNA
  modified_base 2: mod_base = OTHER; note = methylcytosine
  modified_base 3: mod_base = OTHER; note = methylcytosine
  modified_base 6: mod_base = OTHER; note = methylcytosine
  modified_base 7: mod_base = OTHER; note = methylcytosine
  modified_base 16: mod_base = OTHER; note = methylcytosine
  modified_base 17: mod_base = OTHER; note = methylcytosine
acctaccaaatgtttcca

SEQ ID NO: 509 - DNA, 18 bp, synthetic construct
  source 1..18: mol_type = other DNA
  modified_base 1: mod_base = OTHER; note = methylcytosine
  modified_base 3: mod_base = OTHER; note = methylcytosine
  modified_base 4: mod_base = OTHER; note = methylcytosine
  modified_base 7: mod_base = OTHER; note = methylcytosine
  modified_base 8: mod_base = OTHER; note = methylcytosine
  modified_base 17: mod_base = OTHER; note = methylcytosine
  modified_base 18: mod_base = OTHER; note = methylcytosine
cacctaccaaatgtttcc

SEQ ID NO: 510 - RNA, 11 nt, synthetic construct
  source 1..11: mol_type = other RNA
aatttgtctag

SEQ ID NO: 511 - DNA, 128 bp, synthetic construct
  source 1..128: mol_type = other DNA
gtgcaggtaagatcctgttccatctaaatttaagtctgggttgctgggattagggtttcttacaagtagggaaaagctcaaagtattctttcttgtgtttgttaatgtagatgattccttagtgctcc

SEQ ID NO: 512 - DNA, 78 bp, synthetic construct
  source 1..78: mol_type = other DNA
ctttcttgtgtttgttaatgtagatgattccttagtgctccttggctcgaattctctgcactaggtgagaattgctga

SEQ ID NO: 513 - DNA, 124 bp, synthetic construct
  source 1..124: mol_type = other DNA
ttctctgcactaggtgagaattgctgacaacaaggaatgagagattgatgttaaagctattgaatttgatatgaaatttaatgtcctggaaacatttggtaggtgggagggagggggtagcata

SEQ ID NO: 514 - DNA, 122 bp, synthetic construct
  source 1..122: mol_type = other DNA
atttttagtcttttgtatcccttctcttttaagttgtccgagattccccctgctcacagattccccctcttgtccttttacctcccttgtacccaatcttccttgcttacagaaaggaagtg

SEQ ID NO: 515 - DNA, 269 bp, synthetic construct
  source 1..269: mol_type = other DNA
ccttgtacccaatcttccttgcttacacaaaggaagtggaagccccctacctttcaagacgaagtggcactacaccaggatgtgaaagtccagcgaaagagacccaaggcgcctagggggcagcacacccccagaagccaagtctattccaggcagtaccagggattagggtctgggctggaaaaatcctggtgttttgaatatgttcaggtccagttcagactcttgatcccacagccacttcttgagtgaggtgggtgttgctctaa

SEQ ID NO: 516 - DNA, 120 bp, synthetic construct
  source 1..120: mol_type = other DNA
cttcttgagtgaggtgggtgttgctctaattcccctgtttctcttgccattttcacagtccctggggattcttcccccttcagcaaagcaaagcaactgtaccagatttctgggttgaat

SEQ ID NO: 517 - DNA, 125 bp, synthetic construct
  source 1..125: mol_type = other DNA
tgtcattggtggatgagaaattattactctaatatttgaaaggtgttgggggttcatcaagatgagaggtatgataaatataagatgccattgtttttacctgtactttcttcagggtatcctgt

SEQ ID NO: 518 - DNA, 247 bp, synthetic construct
  source 1..247: mol_type = other DNA
aagatgccattgtttttacctgtactttcttcagggtatcctgtcttggtagtgaatggaagagggcctggtccctggggcagtgcagaaggcactttgatcatctcactcactgcaaatgtcatgtgaggtttcatggaagtattaagagatccaattaagaagaatagttctgagtctaaaccagcccagagtggcttctctaggggaaactccccgctcagctggtacgtttgtgtttgtcatt

SEQ ID NO: 519 - DNA, 122 bp, synthetic construct
  source 1..122: mol_type = other DNA
ccccgctcagctggtacgtttgtgtttgtcattagggacaccttgtatctcaggtgcctgccttcagacatctgcctgtactggcttcatgttacacacaaatccacatttaataacactcc

SEQ ID NO: 520 - DNA, 130 bp, synthetic construct
  source 1..130: mol_type = other DNA
aaaagccttattcaagaatgcagaaaaatattcagtaacatttaagataaacttgaagaactatctgataactaggtatttattttactagatattttccttttctgttacaggattcctcatgtccata

SEQ ID NO: 521 - DNA, 230 bp, synthetic construct
  source 1..230: mol_type = other DNA
tactagatattttccttttctgttacaggattcctcatgtccataacatgttggatgaggctctgcagctcacccccactctcagagtggtcagtctccattaattggaccccgtgatttccaatctctgctgtgttggacgtcatgagcattgcaatccctctgggagtcaccacatcagatacatcctactcagatatggctgctggatcagagtaagtgctactttc

SEQ ID NO: 522 - DNA, 118 bp, synthetic construct
  source 1..118: mol_type = other DNA
ctggatcagagtaagtgctactttctaggtagtaggtacattatcagtctgtgtggagacagccttcttatggatagctaataggataatatgtagtattttcttaaccagatcctat

1-94. (canceled)

95. A method of modulating expression of a target protein in a cell having a pre-mRNA that is transcribed from a target gene and that comprises a non-sense mediated RNA decay-inducing exon (NMD exon), the method comprising contacting an agent or a vector encoding the agent to the cell, whereby the agent modulates splicing of the NMD exon from the pre-mRNA, thereby modulating the level of a processed mRNA that is processed from the pre-mRNA, and modulating the expression of the target protein in the cell, wherein the target gene is a SETD5 gene.

96. The method of claim 95, wherein the agent:
(a) binds to a targeted portion of the pre-mRNA;
(b) modulates binding of a factor involved in splicing of the NMD exon; or
(c) a combination of (a) and (b).

97. The method of claim 96, wherein the targeted portion of the pre-mRNA:
(i) is proximal to the NMD exon;
(ii) is located in an intronic region between two canonical exonic regions of the pre-mRNA, and wherein the intronic region contains the NMD exon;
(iii) at least partially overlaps with the NMD exon;
(iv) at least partially overlaps with an intron upstream or downstream of the NMD exon;
(v) comprises a 5′ NMD exon-intron junction or a 3′ NMD exon-intron junction;
(vi) is within the NMD exon; or
(vii) comprises about 5, 6, 7, 8, 9, 10, 11, 12, 13, 14, 15, 16, 17, 18, 19, 20, 21, 22, 23, 24, 25, 26, 27, 28, 29, 30, or more consecutive nucleotides of the NMD exon.

98. The method of claim 96, wherein the targeted portion of the pre-mRNA is at most about 1500 nucleotides, about 1000 nucleotides, about 800 nucleotides, about 700 nucleotides, about 600 nucleotides, about 500 nucleotides, about 400 nucleotides, about 300 nucleotides, about 200 nucleotides, about 100 nucleotides, about 80 nucleotides, about 70 nucleotides, about 60 nucleotides, about 50 nucleotides downstream of genomic site selected from the group consisting of: GRCh38/hg38: chr3 9429827; GRCh38/hg38: chr3 9433370; GRCh38/hg38: chr3 9434591; and GRCh38/hg38: chr3 9428823.

99. The method of claim 96, wherein the targeted portion of the pre-mRNA is about 1500 nucleotides, about 1000 nucleotides, about 800 nucleotides, about 700 nucleotides, about 600 nucleotides, about 500 nucleotides, about 400 nucleotides, about 300 nucleotides, about 200 nucleotides, about 100 nucleotides, about 80 nucleotides, about 70 nucleotides, about 60 nucleotides, or about 50 nucleotides downstream of genomic site selected from the group consisting of: GRCh38/hg38: chr3 9430051; GRCh38/hg38: chr3 9433562; GRCh38/hg38: chr3 9434630 and GRCh38/hg38: chr3 9429009.

100. The method of claim 95, wherein the NMD exon comprises a sequence with at least 90% sequence identity to the sequence set forth in any one of SEQ ID NOs: 333, 332, or 334-339.

101. The method of claim 95, wherein the agent is an antisense oligomer (ASO).

102. The method of claim 101, wherein the ASO comprises a sequence that has at least about 95% sequence identity to at least 8, 9, 10, 11, 12, 13, 14, 15, 16, 17, or 18 contiguous nucleic acids of the sequence set forth in any one of SEQ ID NOs: 1-331 or 417-509.

103. The method of claim 101, wherein the ASO is from 8 to 50 nucleobases in length.

104. The method of claim 95, wherein the method comprises contacting the vector encoding the agent to the cell, wherein the agent is a polynucleotide comprising an antisense oligomer.

105. The method of claim 104, wherein the vector is a viral vector.

106. The method of claim 104, wherein the polynucleotide further comprises a modified snRNA.

107. The method of claim 95, wherein the target protein expressed from the processed mRNA is at least partially functional as compared to a wild-type SETD5 protein.

108. The method of claim 95, wherein the pre-mRNA comprises two or more NMD exons.

109. The method of claim 108, wherein the two or more NMD exons are located in a single intron.

110. The method of claim 108, wherein the two or more NMD exons are located in different introns.

111. The method of claim 95, wherein the agent promotes exclusions of one or more NMD exons from the pre-mRNA, thereby increasing the expression of SETD5 in the cell.

112. A method of modulating expression of a target protein in a cell having a pre-mRNA that is transcribed from a target gene and that comprises a first exon that comprises a translational start site, the method comprising contacting an agent or a vector encoding the agent to the cell, whereby the agent modulates splicing of the first exon that comprises a translational start site from the pre-mRNA, thereby modulating the level of a processed mRNA that is processed from the pre-mRNA, and modulating the expression of the target protein in the cell, wherein the target gene is a SETD5 gene.

113. The method of claim 112, wherein the first exon that comprises a translational start site exon is upstream of a second exon that comprises a second translational start site.

114. The method of claim 112, wherein the first exon that comprises a translational start site is upstream of an NMD exon.
